United States Patent Application Publication US 2002/0168711 A1 - sequence listing, part 2

SEQ ID NO: 1482 - DNA, 10098 bp, Homo sapiens
aaaaagttactaagagcccactatgtgcctagcacagtgctaggtggttaaccaataaatgtgaagtaatgcttacattattcttttattcaggtattttattgcaaactgttggaagaagcaaaccgaggctcgtttccagcagagatggtgaataaaatcttttctaatatttcatcaataaatgccttccatagtaaattcctcttgccagagctggagaaacgaatgcaagaatggtaagaggagtagatagaaaatgatatgtttaaggcagtcatgctgtatttttcagcttttaaattgaaatagaaatgccacacacaactgtaactagacatttatgctaaatttttacattaaagactactgatagaagttgtggtacaaaggacttcatgtctgctctccaaactatcatttagctagtgaagacaagatatcgggtaatgtggagcttcaagaattccggagcatctctctttgctatggcattctgatagcccctttaaaaaggtgctgcattgttttctatcagcctcacagtacggtgaatgagataaagcacaggatgtatgtagaatgtgattacttcctctctagtcctgtcaattcactcattctataagaaatcttaatgtgccgggcgtggtggctcatgcctataatcccagcactttaggaggccaaggcaggcggatcccttgagcccaggagttcaagaccagcctgggcaacatggtgacacactatctctacaaaaaatacaaaaagctagccactagccaggcgtggtggcgcgtgcctgtagtcccagctactgagagtgctgaagctggaggattgattgaacctgggaggtcgaggttgcagtgagctgtgataatgccactgcactacagtctgggtgacagaacaagaccctgtctcaaaaaaaaattttttttaaagacttgtttttctatatttgatacagggaaactactcctagaattggagacatccttcagaaattggcaccattccttaagatgtatggagaatatgtgaaaggatttgataatgcaatggaattggttaaaaacatgacagaacgtattccccagttcaaatcagtggttgaagaaattcaggtaataggactgttttgttcaaagctatgaattactatttccatacaaattatacagtcttctatatctaaaactgagatctagagatctgtctgagatacctagccaaaattcattctactccaaattatgcagatcatctctgcaatgctgaaatacgtatcagtcacatgctgcatactaagcaataacttctccatttgcttttgagaccagcagaggatgatttttattagggtctacataaatttacaaaatgagttcccattcgggtctgtgtctctcttgcattctttcagaggttaagttgttggaaggaatataaagaatgattgctgtaaaccttgagatttgggaaactaatcattctttttttgtcacttgatatctgtgtcctcattttcttctgtttcaccaaacctgaataacatactttaataataccataataatttccacttgattctctagtcaaaattgttaatgtcatattctttgatacagttgatattgaaaaggcatattttagatcatctaagattcttggcatgggaattctgttgttccttgactgtcttcttttgtgtcatatgaatttttttaattgtaccattttaattcctctaattgtcaaatgattttttgagttattttccagtggttgcttttaggattatagtatgcatcttaatttttcacaatgtacttcagattatactcaccttaattcttgtaaaatgtagacactttgttccaatatagctctgttccctcctctatgctctgtgctattagtgtcctgtatattaagtttttatatgttgtgagtctataatacagtgctacaattgttatggaaggatatgagaaaaaaatgtatctataagtctattgtatactattatatttgccctttctggagtaagtttctttcagcatacatggttgttctgtcagtctttgtctgggactacacttattttttcttgacttttgaatgaatgaagaatgaagtccagtttagctagattgggaattcctggtatatgggtttttcctttttattttatttatttttttttttggagacggagtctcgctgctctgttgcccaggctggagtgcagtggcgtgatctaggctcactgcaagctccgcctcctgggtttacttagccattctcctgcctcagcctgttgctgggactacaggcgcctgccaccacgcctggctaattttttgtatttttagtagagatggggtttcaccgtgttagccgggatgatctctatctcctgaccttatgatctgcctgcctcggcctcccaaaatgctgggattataggcgtgagccaccgcgcctggcctttgtttctataatgtttattattttttttttttagagacagggtcttgctcttgtcacccaggctagagtgcagtggcccagtcacagctcactgcagccttgaacacttgggcttgagcaatcctcccaccgcagcctctcaggtagctgggactacaggcatgcgccaccaccctggctaaatcttagaatttttttatagaaacaaggtctggctatgttgcccaggctggtcttgaacacctagactcagcctcccagagtgctgggattacaggcatgagccactgcactcaaccagtatatggagatcccccccagcactttgaatatgtcattctcctgctttccgtcctctgtggtttgagatgagaagccagccattgattgtattgatactcccatgcgtgtgatgagtcacttttctcttgctgctttcaagatgttctctgttttttggctttcagcagtttaaatatgatgtgtctgggtgtggacctttttgtatttgtcctggttagggttggttgagctttttgcatttgtagattgatttttttttaatcattttcagaagttttcagccattatttcttcaaatattttctgtccttttcactttctcttttttaaaatctttttactcccattacacaaattttggtgggttccttttgtttgttttggaaatggtgtcttgctgtgttgcctaggctggccttgaactcctgggttcaaatgatactcccaatctttgttctattattcagattgtataatttctactagtctttcttcaagttccctgattcttctgtcatctcaaatctgctgttgaacctatagtgaatttttcttttcaattactgtatttttcacatctacaaccacaacttctggctagtagagttattggctctcacctctcactcacctcagggatcttcacttctactgatgttgttgggtgtgtatgttgcccaccactccaaatgaatgagcccttttcagcctcagcagaggagctgccagtcctcacagtccgtgccaccctgatggccccttcatagtgactgagctgggagaggaacaggagcaccacaggctagaatgccacagattctcaccgttcttacccaaagttcaacaatttttaaagtgtaaacagatttcaggttgttgcatgccttttaatcaatttctaaaatgcaaatattgttttgtcaattttatctagctttatagctgctttttttttttttttttttggagttagagtcttgctctgtcacccaggctggagtgcagtggtatgatctcggctcactgtaacctctgcctcctgggttcaagcgattcttgtgcctcagcttcctgagtaactgggattacaggtacatgccactacacctggttaatttttgtacttttagtagagacggggtttcgccatgttggccaggctggtctcaaactcctggcctcaaatgattcccccgtctcggctttccaaagtgctaaaattacaggcaggagccactgcacccggcctatcagctgcttttaacagggaggatttgccagtctcttcattcagctgtagccagaaggtctgcctcatccccttcactcctttttttttttaacattcttttattttgtaattaaacactcccctaccttactgaatattgggctcctgctttgatttttactagcttcttttgctaactctgaaatgtaggcagagcacaaagtttgccttctacattcttctttcttttcatacttttcagtgatatcctattcccacatgcctttaacttgccagacaggttcctctagggttgctgtttctagtctagttctctactcccaaactctaggtacaaacagctgagcatgtgaatatcttgtcatccaaacaaagtcaatattttcttttcctatttttagctcccaagcatttttccatctgactttttaggccttacatagagtagataattattctgatatgtattggatttattaggtgacaccattatcctgtcatttaccagagcttgacaacttagctttatctttgatttgttacatgtcttcattctctgtatgtgttcatttgcctgtgaaataatgtattcaaattgcttagcgtagtgcttgttgcatagtaagtgctcactaaatgatagtggcgatggtggtgatagtggtagttattgtctagtcacactctgaattctatctgtacaatgtctgtcttctctatattatgatgaaatgacatgggttgtgaaaagagtggtagattgggaatcaactaacctagtttagaatcctaagtctgctgcttatagtcacttgaccttaggaaacgctcctaaattatctgagccacagtttcttcatgtaaaatatttgggatcagtaatactttccttgatgtacgtaatagattttgggaaaacccaatgagatatttaaatttatataattaatatcttaaactttattaaggaaagctattctctcagcttctatgccaatttcaggcccttattattttcttcctggtctataataacaacttccaaactagtttcccccgtccccctaaagccacactgcagtagattaatctaatagagctcagatctaatgatacaactgtcatgcacaaaaatctacattagatgaaaaaaatctaaactcaccttgacattattacccatattaccattactttacgtcttctattttcctctacttatttttttttttttgccaagaaaacctctctgtccctttcatttaacatacttcatgcttcattactgtgggcctgttctctcaggtttctcctcctgggctcgctccctagtctgtctttttcttcagagcctgtacttatcagaggttgcattaaatgttcccttctctgtgaagcctttagtcacttgtttgcttcaaatgcaaacaccatgtcttaatatagctttgatgctttgcagtaccctgatcatggtgtgaattcagtatatactttaatgggatttctgctttgtttaacaggaacaagaacatttcttattttttcatctcttttgttaacagtttcttggaagcaagtgatacggtcttaattttgccctaagaaatggagctctatttacagaatttggtttctaatgaaaaagaatgctttgaactgatgaaaaaataaaattttctgacagataagatgcccagaccttgttattcttctatatggagtcttttttaagttcaaaggcaatgacatttatcatagccttattatcaaatagtttctgctgagtccaaagtcatttaatacagttgtgcttagcaaacctcattaaataggcacatcttttgaaaaatctatatagaatgatttaataatgtgacttcacaaacccttgtagtgactaattgaagtggttatcagcaatctggaattttcttgcttaaaattctgcttgattttttttcctcctttctgttcttacaccagattggtagttctcaacttcagtgttatagaaatatcaggtgtttttaaatgcatattctctagctgggcatggtggcacgtgcctatagctacttggaaggctgaggtgggaggactacttgggcccaggaggcagaggttgcagtgagatcacaccactgtgtgcctggacaacatagtgagactccgtctcaaaaaaagaagaaaaaaatgcatattctccatctccttccccaaagattgtgatgttacagattgaggtggggttcagaaatctgttttctgttgttgttgttgttttttttgagacggagtctcactctgtcacccaggctaagtggcacgatcttggctcactgaaacctccgcctcccaggttcaagcaattctcctgcctcaggctcagcctccgcatagctgggactacaggcgtgtgccaccacgcctggctaatttttgtatttttagtagaggcggggttttgccatgttggccgggctggtctcaaaccctgatctcaggtgatccacctgtctcagcctcccacagtgctgggattacaggtgtgagacactgtgcctggccagaaatctgcatttcatgcaggtgatggacagtcacactttgtcgaaaaatattgcccttgacgaaagttctgttttacagtgagtttttagacttgctaacctaatttttaaatgtttcttagaaaacctttctcattacagaaacagaaaatctgtgggagcttaactttgcagcatcacatgctagaacctgttcagcggattccccggtatgagatgctccttaaggactatctaaggaaattgcctcctgattccctggactggaatgatgctaaaagtaaatgctttttttttgttttctccctattttggaataatcaagtggccaagcagccttatggtttcaaagagaaatacatctcacagctactttagtcaaatgttgctgttagaagataatttcattggaaattgttatcatcacttcagttaggcaagtcacttttgagccaaaatgacaagtttagagcaatgcaaatcacattaattttgctggttccatgttagtcactggctctgaaatataaaattatagtcttaaagacatctagaatagcaatacacaatttccttgtcagaggaagaatatagccattcagaattacaagtgctcctgtttaattagataggttggtgcataccaagaaagctaaggtgacattcactatgtaaaaataacctaagcagagttggctgcacctgccctaacgtgctaccataacaggaaatggtgctttttattgtccaataacattttcttcaagaaaaatgtatttcaattatgttagatgtcttattttttcatcagattataatgaaaggggtttttttaaaggcttatgagtttcaataatactttacctttttctgcacttttacaaatcaactgtaaaggcatgaatgaaaatttaagaaataacagtggcttgatattcaacaagcagtggttgtacttgtgtacaaccttaaaacattgctactttcccttgtaatttcttgttttctgtcataagtgaacctggatgagagacgaagtacgtaaaacattttttgtcttggatccttaaccttttctttttaaattattattgttgttattattactattattattttgacacagagtcacaccctgttgcccaggctggagtgcagtggcgcgatcttagctcactgcaacctccacctcccgagttcaagccattcagctaatttttgtgattttagtagagacgggttttcaccatgttggccaggctggtcttaaactcctgacctcagatgatccacccacctcagcttcccaaagtgctgggattacaggtgtgagccactgcttctggccctgatccttagccttttctagaacacaagctgtctcagatgtgtttctcccatcatttgagtgactctgaccacagaaacttctcttctccattggccccttccatagtgtaggatgaactcggcttgccatctcctcaaaccaactacttcctatgaattcttccctgtctccattttccatccatctcacctgactgcttgatttgagtggcagatctagtggtgggggtggaggtggaaacactactgcttttcctcaaattcatctctagagcagtggctttatcccatcttattttgtcttcctctatcctggatcctgtatcaagtgcacagcatcgcccacatcagaatagttctttaaaatgtaaattaaaattcagtttattctacactcagactttggtatccccttagatgcccatgtcaaaaatgagaaagttggtgacatggtatggcattttattgctttttgtttgttttccattgctactttcactcaaattccaaggaaatcacagaagaagggctttttggtgacctaaaagtagaaatgaaagcaacaaaatgcattctgtccagcagtacactgaagacaaaaaatgtagttgaaaagtctcagggttgttgtggtaacagaattaagcaggccggtattcacaaaacagaaaagaaaggaagaaaatgggacatgatttaggattgagaggtttttcctagggttagtccagcaagaggtctcggcatccacagcacttcaccagcagcctctggagctcctacgatgtccacaccaaagagttcccattcccacctgccccaggaacaaaaccctccaacactggcctcagaagattccctttcacccgacccaggctagaactgtgaatgtattttcccaaagaaagtaggttatgcttagtggttaatttgctcatacaactagtaaaatacttactactcatgaaatattttagaacttttgagtcagaaacctgggtttaaatctggcccttcaatagcatagctgtgtgacctcagccaagttgtattacttccccatttcattcatctgccaaatggagctaaaatacttaatggtttaaggctgtgtaagaattgatattgtaataaagtacctggtatggatttagtatacactgtaagtttcaaagtctgagtatagaagaaactgaatttttgtttacattttggagaactattctgatttgggcaattctgtgcactcaatacaggatccaggagagagggagacaaaataagttgggctggggccacagctcaagagatgaactaaggaaaagcagtgatgtttctatctctgcttattaattttgatggttcattggggattaattaaacctgtgagcctaaatcatcatgtatgactttttataaggaaatacgaagtttcaagtaatctgcttacaaatgaactttagaaagtatataccgtttataaatggaaaatgccactatttttgttgtatctttggtctcagacttcttaatttagtaagttactcagctatatagaagcacaggaaggacaaagcatatttatttacttttctttttttcccatttagaatcacttgaaattatatctacagcagcaagccattctaatagtgcaataaggaaaatggtaagtggttttcggaggagacaggaacctctgattagacaattatcaataatactgcctcaatactatgtagatttggaccaaagtgaattgaaatagatgagccaaaaagaatgtttatgaaatgtttaatgttatctggaataattctctgaacttgctaataagtgatggaatttatattaaaatgtatgcttactcctaatcccttctaaatttagattttagttaaggtcatagtattattaaagctactaggttgaaacctgcctgtatgtgatcttgctgttttaatttcctaggagaacctaaagaaactcttagagatttatgaaatgttgggagaagaagaagacattgtaaacccttcaaatgaactaataaaagaaggacagatcctcaaactagctgctcggaacacttcagcacaagaacgctaccttttctta

SEQ ID NO: 1483 - DNA, 16489 bp, Homo sapiens
tttgtcaaagtaggagaatagaacatattttatttaacagttgttagcttgattgataacttttaaatatttagacatatggtatgaggcccctgtgtgtactcttgccctggccctgttggcaatggggtgggcttgggtcagcctcacccatcagaccacaagctccaccagggcaggcagcccatgcagtgcccctgcccagagcacagcacctggcacagaggagcagacaataaataccggctgtgagaaacaaatgggataatccaagccgaatgcttggcatggtgcaaatgtccaataaatatcagctgtcattgtctgttgaataaatgaacaggtgggttggtggggctgggggccaagagccacaagctgaggtggcttgtgtctgaggagggaagggacccgctgttccctggggttcacgcttcctttcttgaggttgtgtcctccttccccacaccctgcaggcctgcccagctcttcgtggcaaagcgggccccagatgggtgtacttgtgtgtcagagtgccaagaggggctgggagctcctgctagggctatgtccccctcccctaggacagaacagctgggacagtttccctctttgccttcaggggcctccccaggtccagacagaacacacccagcttagttcctttcttttcacataggcccaaaggttggatgggtggtagctgaaagaactgattttccccctacccaggctgtactctggtgtgggaggagccttttctggggaatgaggtcactcactggaccttgagcaagtcacactgctgctgcaggcctcagcgtccttgtctgtaaaatgggatggtgtgtggaactggtgcatgccgagcggcagatgcaaggtgtgcacttggtgaatgggaagaagccttgcacagaacaccagtgggtcaaggacagcagaggcccgggacccccaacaggaaagcagatgaaactggcccacagccagcctgtgagaggctcaggcaggaggtcatccctgaggcctgaggaggatagcttcagcagcccacactgaaggctgggtcagtcctgtttccacagtggggaagtgatcagagctgcctcatgactggcacagtgccagcacagggccagggcccacagggtctctgtgaaggcctccacgaggtgagggccagaagcagccaggaagccctccatcaaactcctcctcccagcacctaccattccagaaaacaaactctcacccccacacacgctatcgcacacgcacagtaggcgcgatgcaacagagaaaaaaccgaattaacccccaaacaggacgtgacgggaagggaaggggggatggggagttgggaagaaggaatcacattttgcaaactgcccactaggggtcaccgtaccctcagaaccgagggtgcagaagtcacaccggcctgcggctatgcgctggcggagggtcccagagagaagaaggcccggctgcgtggcctccgccgcccagcttgtgtggcaggaccgcggccgccgccccagtcacaggccagcagtcagtgcggcgggaagatgtccgcgcactgctgcaggatgagctccaccacctggttctggaacaccatggtcatgggcatgctggtctcttccacctcgggccgcagcagcgtgggcccgaacacaatggccacgctctgcaccgacatgcggttctgctcgccgtgctcgatcaccctgtggcaggggtgggtgggttcagggctccgaactgcgaactgcggggaggcgctgggggcttcagccgggacctgcctcccccttcccgcgcgggccgcccggctcaccggcagaggtgctggaagagcatccgcagagtgtcgtggttgggagcgggcagcgagcgcaccaagtcacgcacacagcggctgcgccgggcctggtcctgcaactctgggtgagggaaggtttagagggagggagtcggaacgggaggtagggggtatcggctgggcgaggggagcctgctaaaggggtgccccgccacgcccctaccccatccgccccacctgccccaggtgctcactgatggccgcaatgaactggcggaagtgcgagaaggggaagaggggctcgggcagctcccgaaagaagagcttcagggctccggtgataacgtggacgtcctcccagcgcccgtcatccaggtcaaggcgctcatctgtggcggaggaagggaggaggacggaagggaaatcagtaccccttgcgccttcaggccctggggcaggggttggggacgggcctcaccgtggtccaccttatagcgtagcttctggatggtggccaggtttccactgatgcggtacagcccgtcgatgtccagccctgggccagagggaggcgctgatcccgggttcagggatggggatagggtggggctacgggtccctgctatgactcccactcggggcctcccgtactttccccctggaccctgcgtccatccaggggtctccagcctgcggtcctggcaggaggcctgcgggcaccccaatgcctgccgccctcacccccgcagcgcacgtaccgcgggcctcgacggcgcggatgcactgctgcacgaagcgtggcacccggctcctctcgcgctcacacagcgcggccagcgcgcagccgaacacctggtctagggcagaggctcatcagctcctgcccagcctgcgccccgtcccggtcccgggtccccgccccccgcaggcctcgggtacctttgatgtagcccttctcccgcagcgactgcagtgtgggccgcctctggaggaacttgcggagcttgtgccggaccttgctcaagtcgctctccaggcccacggggcccagggcgggcgcggctgccgcggggaaaggcaggactgagtcaggaggcagcgccagggcaggccaggcaggccccagcaaccgtcactccccaggagaggcctcctggagcccccaccccatcctgccttgcgcacacctgcattcggtcgcgcgtcctcctctttctcctgccagcttcccaagcgctcgctcgacccgaagtccactctgctgctctcgctctcctctgggggcagctctgcggactggattcccatagcctcagagaggcggggccttgagccagctgcgggtccttccaggatggggcaagggacccgaaatgcactcccaacaggcatggcctggagaccctcagcgaagagtcctctcttcccttaaccaggttaactctccttacctccaccagtgagcctgagaacattcacctcccttagctgcatggagcccttaaggtgcagagacagtcatcctgttctcccacaccccttcctatcctggggactcctacccacctggtgccttctttctctattttcctcagctcctctaactgggtcagcattcctcaatacgtggctcccagttctgagcctgcacctccagctgtggccggagcactgccaacaactgcaccaatatcacctctctggctctggattcctacctctattaatacagccaaaagcttcactcaatgttggctcatagggaattaagggtcaaaaagccccaggtcatttccaggtcagtagttgtcagagggcccctgtcctagctctacttatgcaattggtgttttcagccttaaaaaaatggtcgactattgaaatcaatcctttaaaattttatctgctagtttcagcctgccattggttggcttgcagagtatttatttggccttctgcctcccgtgaaatgggaacttcctttagaatgtgccctaccctcacctggagagtcttcctgcagggccaaccccagggctggattcacagacttacagaaggcagtttcttcagccgcctaccctgccatcctagccattagtggggactgcatttgcattacccactggtaccttagagctccctgagcctgagcagagggccccactcataatggccaccccctccccactgcccctagaggccctgggctctgcttaccagctcctggatgccctgagcaatggccttatgccaggtgctgatgatggcctccgagtcgtgctggatcaggtactcagagccatctcggctccgtagctggagggacacaagtcagtgggtcatctctggtaccctgggtctgccctgggggttggccctagttgggggtaggtacagagatagaggtgacctgtccctgcccccaggcactcagagcttaatggagcaagggcctcaccccaggctaagtcttggatctctgcctcacgtaaagcagtggctgacagcatctctgtgttacagatgagcaaactgaggctcagcaagttttagctgcttcctcatgggcacacagctagtgagtgatgagcacagagctgcatggctcaattgtctggtacactttccctcccccatcctgcctccctgcaagccacagaacatggcaggcctcatgcagagcactggcctgcaaactaagtgaaagaaacttcctatgtgaggccaggcacgatggctcatacctgtaatcccagcactttgggaggccgaggcgggcagatcatgaggtcaggagtttgagaccagcctggccaacatggtgaaaccccgtctctactaaaaatacaaaaattagccaggcatggtggcgggctcctgtaatcccagctacttgggaagctgaggcagaagaactgcttgaacccgggaagcggaggttaccgtgagccgagatcatgccactgcacttcaccctgggcgacagagcaagactccgtctcaaaaaaaaaaaaacaaaacaaaacccagaaacttcctatgttgagacccctgtctactagaagcaacagtgaatatagggagagaggatttgaaagctgatcatggctgatcccagggaaagaaaggtctccccttgcccctccccatacacacactgaggactcagaaacgttgtcccaccttctgcagccaggagtccccaccacctcccacactccagcctgggcaacacatcttctgttagcccgcttcatcatgaagcataaattaaacagaacaccagagggaaacttgccaccataggactgacgctcaaagccctttctgagttggatggcagcttagttggattccttatcagcctctggctctgaggacccagtgttccaggttaatgtgaatgtttggcggcaacagctcacaccaaccctgcccttttggttcagcgagagtcagagacaacagaaactgtctcagaccccaggacacaacttctagaattggattggactatctttgctgtccttttaaacttatacttgaagactatttaaactgctttttaaaatgaaatgaggctgggcgcagtggctcatgcctgtaatcccagcactttgggaggctgaggcgggtggatcatgaggtcaggagatggagaccattctggctaacacagtgaaaccctgccactactaaaaatgcaaaaaattagctgggcctggtggcacgcacctgtagtcccagctactcgggaggctgaggcaggagaatcgcttgaacccgggaggcagagattgcagtgagccgagatcgcaccactgcactccagccagggcaacagagcaacactctgtctcaaagaaaagaaaagaaaagaaaagaaaagaaaatggcatatctcatcccctagccctcccctgcaaaggacagagaaccttcaagaggcagataacacagcctcactctaatcaaagcagacaagagccctgctcaagattatcccagagaatggcttgacaacacttctaaaacaacagccatgatttttggcagctctctcaaaacataatcagttcatatttgcaagtttcatatagagggcaaagctgtatcattacatagcaatgtatttcacaaaatattcacccccagccaggcacaacggctcatgcccataatcctagtgctttggaagggcaaggtgggaggagtccttgagaccaggagttcaatcctgggcaatatagtgagaccctatatctagaaaaatttttacaaattagccagacatgctagtgtgcacctgtacttccagctactggggaggctgaagtgacagcatcacttcagtccaggagttggaagctgcagtgagctacgatcaagccactgcactccagcctgggcaacacagtaagaccctatctctaagaacaaacaaataaacaaaacatttatcctgctgaccgcacaggcaaatgctagcagcttttggcggactgttgctgaagttttctgtaactcggggtgactagaaagacctgctgtgaaaatttcctgggcccaacaaagccatccatcctcaatgatataaaatttggggctgtctcttgaggaaaaccctggagctgcctacaggccgccctgcatggagggaggatggccagcagtcaaccaggaggcaggggcttgtgatttccattcaggcctgcccaccttcccactggcctgagcagcacctgccttccagtccttgccagcaaagacaactcaaaaagccctattctgaaactttcatcaaaagtccatcagtgatgatcttcattgagaactgtttgaaggatatacctatccctcaaagtcaggggagaaacatgactagcacaggtgatgtctcagaccgggcatggtggctcacacctgtaatcccagcactttgggaggccaaggcaggtaaatcacctgaggccagtagattgagaccatcctggccaacatggtaaaaccctgtctttactaaatacaaaaaaattagccgggtatggtggcaggcgcctgtagtcccagctactcgggacgctgaggcaggagactcacttgaatccgagaggcagaggttgcagtgagccaagattgcaccactgcacttcagcctgggcaacagagtgagactctggataataatcataatcataatcataatcataatcataatagtgatgtctctcctcaatttaacaccatagcagatattgttagttgatcacagaactctatcctgccaagcccagagaagccttcagaattcttctcaagaaggctccaggctaggcacagtggctcacacctgtaatctcaaccctttgggaggccaaggctggaggatcacttgaggccatgagtttgagacctgcctgggcaacatagtgagcccccatctctataaaaactaaaattagccagatgtgatggaacgcgcctgtagtcctagctactcggaagccttaggtgggaagatcgcttgagcccaggggcttgtggtttcagtgagctctgaccgtgccactgcacttcagcctgggcaacagagcaagaccttgtctctaaaaacagaaacaaaaaataaaaacaaaaacaaaaccccacaagactccagacctactcatcagagtagctcatgagatgaaaccagttttccaactttgctttatagatatcctggctctagaactgaatggagcttggtgaataatcaggaaactacactctcaggttccttgcagaactgttttttctgagcttagacatgaggtcatgctcttggccttcatcataatgatgctacctgaagcagtcccggatcctgaattaaaccttcctggagctgttttgcagggtacctggcatgtgcttctagatcccatgttcatggagctacatacaagaaatttaagagtgaagggttaggaaaaagctttgattccctcaacatctgggtgggttttattatttgttcaacaacaaagagacatgcacctgatagcccttctcttttcacctcacctagcaggaaagtcggagctaaattttcttcagtaaccaccaccttagcacccatacatcatctgccccctaattcctctccatcttgagtcccatctcttacttgtttttcatggtcctggcttttcagttaatttgacagttcaccacgtgtgtttctgttgtgatctgcctcaaaccttctaggtactgaggtcagggtaagagtagtttaaaaacaagacaacacatggacagtgaagggtgtggcattgggagtaccctttctgggtcttctctcccttcctgcgggggtagcatggtagtcttctccactgccccagtttattcactggggatgcggtccagtcggaaatggggctctggctcaggggcagggaaagggacctggggagaaagaggtttcccaaccaggcctgtcacagtaagcagccagggacagggagcctcctgtctctctcaggctgggacgagggctgccattctagtcatgagaatttcctctcccagaggccctactcctcaccaccctccagggcaaggattattattaactcagctcctggagagggaactgcagaatatgtgatgttagaaacaaaggacaggtcccctggggcgggggtgcagcgttggccttgagccctgagaatggtagccccaattcttcccaggtcctccttcttggggcttgcctacagtaagggtcccacagcactgccaacaactgcaccaatatcacctctctggctctgggttcctacctctattaatacagccaaaagctgcactcagtgttggctcatagggaattaagggtcaaaaacccccaggtcatttccaggtcaatagttgtcagagagctggcaggcatcactaagccccttccctccttctccccaaccccgccactcacctccagcacattcttcctactggatttgtctttgggggcccaggagagagtggcccccctcagctccactgtgtactcaggggtggaaaacttggaaggctgcctctgtgggagagggaggaaggtcacagggagccctcagttcagatgtgtctgctgtggcactctgaccctaggaataggatggggtcactggcatggccaggaaacaactctggggaaaagtgccccaagtgttcctgaacccagagaccctgatgcttcttaaccatggagcctgctggctggcatgtccactgctgcccacccacccaggggaggacaggaaaggagtgcagtctgcatccctgcaagcaggtgtgcccacccccagcctccctgccctccaggctggagctggccaccctcaagactgttccccatctccagtgggctaaaactacttgtcttggagtgaatctgccagtatcacccccttcctgccaaggcccagctcctctgacactcatggaccactctctcagacctggtcatctccaagccagattagatagagcagatgggggctgggcacagtggctcacgcctgtaatctcagcacttgaggaggtcgaggtgggcggatcacctgaggtcaagagtccaagaccagtctggccaacatagtaaaaccctatctctactaaaaacacaaaaattagccgcacatggtggcacatgcctgtagtcctagctactcgagaggctgaggcaggagcactcaggagggagaggttgcagtgagccgagattacaccactacactccagcctgggtgacagagcgagactccgtctcaaaaaaaataaaaataaaaataaaaaaaagcagatgggatggtccctgccctgagggcctggccttaccaggccgcctgcagccgaggtctttgagtccttgaagaatgtcaggacgccaccctccagcacagtccaggaggcactccagtgcttcttcctaggtgggggtggggaagtgggggtggcaggacttagatttggtcctgggctgagggcccctcctaccccaggaacaagtcagagcttaggaacacaggctagggcaccccattatgagggctggaatcccgactctaacacctagcagccgagggaccttgagcaagtcactttatctcacagtgtctcagggtccacagaggaccactcacgaagttgttgtgaggattaataagagcctggcatacaggaagtgctcagtgaacatcgtcaccaaggcccaccctgccccggcctgagtgtagatgggctctcaccggagccgctttcccttgtctgccgtcttggtgcgatggagcacccctgccttgtccaaggtcttggtctaagagagagaagagagagcaggcgcaagagtgtgtagttaaggggtgagctatggggagtagaggctggtcacctgctcagctgccactctctatggtctgggcccgtgtctccactgaaccctcctcgccagcaccaccacctggctgggggtagggggtgatgcctaccctcacagcagctgtggcaggagagacttcctcccagctcccaacctcatccagctctgctgggacctatgggggaagacagatagatcccaccaagtccctcctcccaggaactccagaagccccccactgcttctgtggtggtcctgccaggacctcaatggctcctcccctaccttctcctctggagggctggcctgggctggggtgtcaccatcctggctggatttatggatgcttcgaggggcagggacagggacctggggagaaagacacagtcgtatatgatctcttcctctctccccaacacccccctttccccaggttgttacctggggcagctcccatcgaacagaggagtcctctggattgtagaagtatggcttcccgtgggggtcctccagcctcacccactgtggggagaggaatggtcagggcctccagcccagcttatgagaggggaggaaaagtttccctctaaccaggttccaagacagcaccagggagtctggaggggcaggtgcaggtgactgtgtttggctggtttaggctctgtgtgggagctgcggtttagagcactgaggcgacctattagtgaggaaggttgtggggaggactctgaggctgtccgggtccatctgccccctgcccctacctgctcctgagtgaagtggttggtgtagagcatctgcttgtcctggctgacatgacaagaccagccggggggtgtggtcaagggagaggtagggccgggctcaccgaaagagcccacgggagaatagtcctcctcggggtaactggtcagcgactcggggtagtccgtctcgggagtggggggctgcggggaacagaaggtggagtcagaggctctgagtgccagtactgcctgctggccctgccgttttggaccaggcccacccccttgccttctggtccctgaggctgtgggagcaggaggcggggtcagaagcgctcagaggtagctccgcacctcaccctctggtccctggggctgtgggagcagaaggcgtcagaggtagccccgcccactccagccctgcccctcaccttctggtccctgggtctgcagaaacaggaggcggggtcagaagcgcttagaggtagccccacccatcctgccccacccctcaccctctggtccttaggtctgtgggagcaggaggtggggtcaaaggcgctcagaggtagccccgcccactccagccccgcccttcaccctggggtccctgggtctgtgggagcaggagaaggggtcaaaggctctcagaggtagccccgcccacccatcaccaccccctcacccgtgtgtccctgggcctctgggagcaggaggcgggatcagaggcgctcagaggtagaaccgcccactctggccctgcccctcacccgcgggtcccctgggctgccagggctcaggcccggctgcatctccaactcctcctcgggctcgttctcggcctcgtcctcccaggccgtctcgcccgtcagcgggttgtagaagaacaccctgcggctctcctcatcccagtactggccccactcggtctcaaggctcacgtggctgtccaccgaggcaggggaggtggctgggctggcggcaccctcggcagcctcaaagggcgactcccaggtggtaactcccgtgtctgggttgtagtagtaggggcgcccggtgcccgcgtccgtgtgcgtctcccacaccgggctgggaaggggggctgcagcggcgcccggtgaagtggcccggggctgcctctctatgttcgcgtacacgggctccggtgggtcgtccacctgcgggaggagaaaggaggaattttgtgttttcagaaaccttccaaaatggtaacagaggtcccctctgggcagtgcgattataggggtttatttgttttcgctttattttctttaaacttttctgcagcctcaaaattttgtacaacaaagcattttaaaaatcacgtaagttcttctgctcactgtgacaccatcactaagccgtaaactccttgaaaggggaagtgcctgttagaagtggcctcttcttgagctttagccccttgggcgaccttcaggaagtcacactacctctctgcctcagtttcctgggtgtaaaatgtctgctctgtccattccggaaactgtagtgaagagtgaatgaggaaatgctcttgaaagtactttgtaaagtatttagtgccccagacgggtgggtcaattacattaattatatttatcaataataataaaacatcgataacccagttctcacaactgtgcactcacagaggcaagtcagaggttgggcaggaactgagaagtggtctggggcgtgcccctgtttatggtgcccattcagggccctgctgcattcttttttttgagatggggtctagctctgtcacccaggctggagtgcagtggcgcaatcttggctcactgcaaccaccacctcctggattcaagctgcattcttacagctccactgagagctcccaccccaccccactctcagcccagaaagctctgggattggaatcagcaccctgtctggatttggggactgaactttccaaggtgaagtttgcaggtgtcagaaccaattccagacaagagagggagacaggacagccagatgggctggagaatggaggggcaaagagaggtgaattgttttactccaccccaaaggagagtgagggcagctgggggttcaatcacatagaacataaacctagccatgcgtaagcctcccggaacagaggctctcctgattcacacctcagagctccctgctggctgcagggcaaagtctaagcccttaaccaggcacaagagaccgtccctcaccggcctgtgcttccactattatttcctgccactccttgccccttgccttgaactttaagctccagtagcaccagttgctagaggtccccaccgtccctgctgtgtttcctccaggcctaggctcatctgcagcctgcccaggcccatctccacccctttttttgcctggctgactccaattccttcttcaggattcagctgaggtgccaggttccagccttttcctgagattccccccatccccgtgcccccacattcagcccagcacccttggccccacagagggacagatgactacattctcaaaccccaggcagcagcatggcatacggagattactactattttcttttcttttctttttctttttcttttttttctttttttttttttgagatggagtctcgctctgtcgtccagactggagtggaatggtgtgatctcggctcactgcaacctccgcctcctgggttcaagcgattctcatgcctcagcctcccaagtagctggcattgcaggcacgcaccaccacgcctggctaatttttgtattttagtagagatggggttttgccctgttggccaggctggtcttgaactcctgacctcaggtgatccgcccaccagggcctcccaaagtgctgggattacaggtgtgagccaccgcacctggccaattactactattttctaagcatacacaatacttcaggggaaagcagatttccacatttcaattttgtgttttcggaaactttccaaaatgctaacagaggtcccttctgagcactgtgattataggggtttgtttttgttttgttttctttgaactttcctgcagcctcaaaattttgtactacaaaacttttaaaaattcacagaagttcctctgctgactgtgacaccatcactaagctgtaaactcctcgaaagaggaagcacctgttcagggtggtctctccctgagccttaggcagatgccaaaaaaaaaaaaaaattcatttttcaccaaactgatgccaaaaaagcaaaccaaaccaaaacaatgaaaagaagaaggaaaagaagaacatttgtttacccaacaaagattcacctgctctgtgccaggcactgtttgaggcacggggaatacagcagggaagaaagggacacaaatccttccctggcagagctggcactcaagtgcacctgtgtgtaaatggtgggggtgatgagtaaatggacagcatgtcagtgctgatcactgctaagcaagaaatgaaaacactgtcaatgaagaggatgttacagttttagacagggtgccagtccccaggcgcctgggggacagggagagctggggatcccagcccatcagttcttctctcctctccccttcctccaggctgctgtgtggctgagaggggaccctccaccccacttgtcctttctctacccccaccatagctctgatgtggcatcctgtagtccaaccacaacaggcctctcaccggcccccaacagaaaaggcatcctcccacctcgaagcgtttgctccagccattccctcagcctggaattcccttctctggttctctgcctacccaaatcctgctctctcacggtgctcagctgacaagcctctccagggagaggtcaaacctgctggcactctgctcactgctctgttgaggcccaatggcgttctgccttggtgggcagccagttgtccaaccatctgcccacctcctctgccccaaaaggcaggattttcttgagagcaagactaaggataatgtagctgattccatttgccccccagcagctgggccaatgccctgaagcacatagcaggtctgccacaaactgcttgtgtacacaagtctaacccatgcccagtttcagcaacaaacatgcctgacatgacagaagagcctggaatgagcttgagctttctgaggaggagggtcggagccacagaaaccaggagattcctggggagggcaggatggaagcagcggggagaggaaggcagaggaaccagacacacctcccatcctcccagctgaacgcactggggcaggagttgaaaggctccaccaggggtggatgagctgataaggaacaggctctttggagcaggaatttctacttggcaggctgtgggccatggctctgggtccacgaggagtcccaggccagtgaggctgatggggtcctcacacgaaggaatgtccccagcaggtacagaggagatttcggaggtagaagtttaggtccccagcatgacagggctgtcacaaggaagagaagatggggtatcatgctgcaggggcacagcagcattcctctgaaggaagcattctgaggactagggctgccagagacacaggctgcttctggaggtagtgaggggccctcactggaggtgactgagcagagtctactccctgttagggaagccatagccctgtggtgggtgttgaactgcagtgtccttcaggccccttcaaactctggaactctcggcagaccctgcacagtgctgagatagagatgctctcctctcctggcagagcctcagctgggttctaaccagctcctggggccaggtgcagtcacgccctccacatcctctggccttcaaggagttacaggcgcctgccacccctaccctcctccttgctcctgttcatggaggcccagacaagacccagatgcagctcataagcaggggcctgactacgggatcaatggctcttgggtcgcatcctagagacaagaagtggccttccgacctcaggccagaggaggagccaagagggacctggctctcaggctccaggctgcccagccccctggtactgccttacagtggttcaccccttatctccagttccctcccctgtccacaagcaggtggcagccctgccactcttgccccaagctgaccacctcttggatgggcagggcctccgagaaggaaagagaaaaggaagtatgagccccaacttccaagaggctccctgctctaagccccagctcacccagctcctaacagggcttgtggtagaggcccaccgggcaccccttgaccccagcatcccctacctgtgccggcaaggctcgactctgcctcctggtcactttggcgattatgtccaccatcctggcccctctgaactgccgggacagagccctgggaaggttttgggggtagagcccaggggcactaccccagtgctggcacagggcaacagggaaac

SEQ ID NO: 1484 - DNA, 5819 bp, Homo sapiens; identical to SEQ ID NO: 1466

SEQ ID NO: 1485 - DNA, 5819 bp, Homo sapiens; identical to SEQ ID NO: 1468

SEQ ID NO: 1486 - DNA, 604 bp, Homo sapiens; identical to SEQ ID NO: 1469

SEQ ID NO: 1487 - DNA, 22452 bp, Homo sapiens
gacctccttgaggcccgccgcccgcgggcccacgagtgcctgggtgaggctctgcgtgtcatgcatcagatcatctccaagtacccgctgctgaacaccgtggagacgctcaccgcagccggcaccctcattgccaaggtcaaaggtcagcctgctggaacagggctgcgagggctctctgcctagaagggcatcctggaggaggggatgtttgaagtgggttttgaaggatgcataggagtttgacaggcacaagctccctcctgttccccctgggttaagggctccggtcagttcttgcagggatggtcacctcccagagtgggcccacctccttgtccttatctctgcttcccagccttccattatgagagcaacaatgatctggagaaacaggagttcgagaaggccctggagacgattgctgtggccttcagtagcacgtgagcacgggagcctgtggggcagggcaagggagcgtggggggcccgggtgtctctcgatggtgacctcgctggccctgcagagtgtccgagttcctcatgggtgaagtggacagcagcaccctcctagcagtgcctcctggggactcgagccaggtgagtggggtgggccagggccacctgtgtccagcttctggaggccagccgggttcaggtctgcagggcccagacagtcaccctgcttcccctgtgcgccttggtttccctctctgggggaggcagcaaccgtcccctgaagggtgggcactgcccagggccccgcatggggctggtctcacctgcgtctccgtcctacagtccatggaaagcctgtatggaccgggcagtgagggcacgcctcccagcctggaagactgtgacgccggtaagcccccacccagcggcaggcaggcatttgaggggtgggccattgcgcgggtcgggccaggctgagcaggcccccgttccctgcaggctgcctgcccgccgaggaggtggacgtgctgctacagcgctgtgaggggggcgtggatgccgcactgctgtatgccaagaacatggccaagtacatgaaggacctcatcagctacctggagaagcggacgacgctgggtgagagctggtgtcccagcagggtgggtctggagggagggggttctgggtgagctgggaaggccttgtcccagcacctcacacccctctccggcccgcagagatggagtttgccaagggcctgcagaagatcgctcacaactgcagacagagcgtcatgcaggaggtgggggccccgcgggcacggggcgggggtccctgggcccgggtgtgagtctcagccccatttcaagggcccagggaccaagagcaggggcttcccctctacattaacgggggtggctgcagggaccagggagctggtggctgggggtgctggggccgccctgcctccatccctccccacccagtgagccggtgccccacccacagccccacatgccgctcctgtccatctactcgctggccctggagcaggacctggagttcggccacagcatggtgcaggcggtgggcaccttgcagacccagaccttcatgcaggtgcgtggtgcccgggagggcgggctgggcgggggtgtcaccggggtacccactcacggcccgtctcgccccagcccctgaccctgcggcggcttgaacacgagaagcgcaggaaggagatcaaggaggcctggcaccgtgcccagaggaagctggtgaggcgggcgggcgggggcgggcgggggcgggcagcgggcctcggcgcaggcgcagtcccagccccagccccatagcgagggccctgcggcgagctccgcacacgccccggcctcctgcgcatgcgcggcctcgcaggctgggccgccccccccaacgccaagccgggtcggagatgctccagccccgtcgcccccagctctgcctggaaggacccaggagcccggcgctcactgctgtccctgcagaaatggggagaagccgtgcctccctcggttgtaagcagctggtctccgggttgagggagactgatggtctctcaggactgggaaagcgccatgctcctgcatgtattctttttttttttttttttgatacggagtctcgctctgtcgcccaggctgcaggctggagtgccatggcaccatctaggctttcactgcaacctccatctccctggttcaaacaattctcctgtcgcagcgtcccgagtagctgggattacagaagcacgccaccacacctggctaatttttgtatttttagtagagacggggtttcaccatagtggtcaggctggtctcgaactcctgacctcaggtgatccacccgcgtcggcctcccaaagtgctgagattacagacgtgagccaccgcacccacccggcctcctgcctgtattctcttcccacttcgcttttgggttatttcaaagacgccggcgcctttttgtttgtttctttgcttgttttgagataaggtctcgctctgtcacccaggctggactgcagtgacgcaatcatacctcactgcagacttgccttcttgggctgcaatgatcctcccacctcagcctcctgagttcctgggtctacaggcaccagccatcacacccagttcatttttttgtattttttgtatactcactatgttgcccagtttttgtttgctttttagctgtgttaacacggtctgcagtgaaacgcaccctcctagctccttccagcacataccggcaaacacatatctgccctgttttgtacacacgaggacagctcacctcatgccctgttctgctcctgatttttatcctcacctccatatagagaggctcacccgatatcagtcagcatgaagcagcctgaaccccttttttcggctgtgcagggctcagctgaggagattgagtaggttatttcatggacgtcttgggagtggctgagctgttgctgttacgaacaccattgctatgacaagcttgtgcccctgtctcaaggatgcctgagggatcagtgcccaaaatagaactgctgggtcaaggggcgtgcgtgtatgagctaccctcccaggccacagccctgcttttcctcttctgtgaaccctcagttcttaacctttgcttagttcttatcctttgcttactttgtactggacagtggcttatcattgatttgtcagagctttttacatattagagaacttaggccttaatcatgtgagttttagactccccccattcccctcccacaatttactgtttgacttttgatttttacctgtggcctattttgccaggtagaaacctgtgattgttggcagtagtcttttttttttttttttttttttttttttttgagacaagagcctcactctgttgcccaggctgcagtgcagtggatcgatctcagctcactgcaacctccatctcctgggctcaagcgattcttctgcctcagcctcccaagtagctgggattacaggcgccagccaacatgcctggctaatttttgtatttttagtagagatggggtttcaccaccttggccaggctggtctcgaactcctgacctcaggtaatctgcccaccttgtccttccaaagtgctggaattataggcataagacaccgtgcttggctaatttttatatctttggtagagatggggtttcatcatgttggccaggctggtctcgagtagctaggaccacaggtgtgcgccaccacgtctggctaaattttttaatttttttgtagagatggggtctcactatgttgaccaggctggtctcaaactcctggcctcaagtgatcctcctgcctcggcctcccaaagcactgggagtacaggtgtgacccatggcgcctggcggtctcctagtaattggatgagtccgtttgtttgtgtgcgaatctgatggtgcaggttgtgaggtgtggcccccgagcccacaggtttttgactaagtgctcttcctgccaacctgtgggcgcctggcttcctgcctgggcggcttctctgttctcgtctgtgaggagggaagtgaaagcaaaagagcccggagacgctcccgtgggggctggtgtgcgtgtctgcagaggctgccgtgtgagcctctgtgcagagcttggctgcacctcagcttcccgggctgcagagtgggcacacaggacacccatttctccgagtgtcctgttacgggtgcctcctcccgttcttttttttttttttttttttgagctggaatctctgttgcccaggctggagtgcagtggtgcatgcaatcttggctcactgcaaccttcgcctcctgggttcaagctgttcgcgattctagtgcctcagcctcccgagtagctgggattacaagcgtgcaccacaatgcccggctaattgttttaaattttgggtagatacggggtttcactatgttggccaggctggtctcaaactcctgacctcaagtgatccacctgcctcggcctcccaaagtgctgggattacagacgtgagccaccgcgcccggccactcctcctgtttttccgctgccgattgttgtgcagggtcctctgcatgcccagctgggccatggggccttgctgagagagatgggggtggggaggaaaggaggagctggggagactgagtcccatccgaggatagggttggaactggcctcctggctcccacacccacagcaagaggcggagtccaacctgcgcaaggccaagcagggttacgtgcagcgctgcgaggaccacgacaaggctcgcttcctcgtggccaaggcggaggaggagcaggctggcagcgcgccgggagcaggcagcacggccaccaagaccctggacaagcggcggcggctggaggaggaggccaagaacaaggtgagggcgggtggaggcagggctggaggtccctggaggaggagatccaatgcttggtgtgacatttactacctccagacctttgtttttgtttttttgtttttttgtttgtttttgagacggagtcttgctctgtcgcccaggctggagtgcagtggcacagtctcggctcactgcaagctccgcctcccgggttcacgccattctcctgcctcagcctcccgagtagctgggactacaggcgcccgccaccacgcctggctaattttttgtatttttagtagagacggggtttcactgtgttagccaggatggtctcgatctcctgacctcgtgatccgtccacctcggcctcccaaagtgctgggattataggcatgagccactgcgcccggccaatttgttttttggagacagagtctcattctgttgcccaggctggagtgcagtggtgagatctcactgcaacctccgcctcccaggttcacacagttctctgcctcagccaccctgccaccaagcccagctaatttttttgtatttttagtagacacagagtttcaccatcttggccaggttggtctcaaactcctgacctcatgatccacccacttcggcctcccaaagtgctgggattacaggcatgagccaccgcgcccggccccgatttttaaattattattatttttgagacagtgtcttgttctgtcacccaggctggagtgcagtgacgtgatcatggctcactgcagcctctacctcctgggctcaagcaatcttctcgcctcagcctctagagtagctgggaccacaggcgtgtgccgccacacccagctaatttaaaaaaattcttggccgggcgcagtggctcacgcctgtaatcccagcactttgggaggccgaggcaggtggatcacaaggtcaggagatcaagaccatcctggctaacagggtgaaaccccgtctctactaaaaatacaaaaaattagctgggcgtagtggtgggcgcctgtagtcccagctactcgggaggctgaggcaggaaaatggcatgaacccgggaggtggagcttgcagtgagccgagatcgcgccactgcactccagcctgggcgacagaacgagactctgtctcaaaaaaaaaaaaaaattctttataaagatgggggtctcaggctgagtgtggtggctcacacctgtaatcccagccctttgggaggctgagacgggcagatcatatgaggccaggagttcgaaaccagcctgggcaacatggtgaaacccctgtatctctactaaaattacaaaaaattaaccgggtatggtgggtggggggcacctgtaatccgttacttgggaggctgaggcagaattgcttgaacccggtaggtggaggttgcagtgagctgagatcgtaccactgcactccagcctggcctacagagcaagactccatctcaaaaaaaaaaaaaaaaagatggggagggtctcaccatgttgctcaggctggtctcgaactcctggcctcaagcaagtctcccactgtggcctcccgaggcgctgggatgacaggcgtcagccccgcctccctgaggtttctgtctgagtcctgcaccccgggctgaggcctctctctgtgcgccccgcccccaccgcaggcggaggaagctatggccacctaccgcacctgcgtggccgacgcgaagacgcagaagcaggagctggaggataccaaggtgacggcgctgcggcagatccaggaggtcatccggcagagcgaccaaaccatcaagtcggtgcgtggggtgctccggccgcccgggcggggatggtggaccgggcggcctcctcctgacccctccgctctccggtgccgcccgcaggccacgatctcctactaccagatgatgcatatgcagacggcgccgctgcccgtgcacttccagatgctgtgtgagagcagcaagctgtatgacccaggccagcagtacgcctcccacgtgcgccagctgcagcgggaccaggagcccgatgtgcactacgactttgagccccacgtctccgccaacgcctggtaccgccacccagctgccctgtccccggcgcacaaggccctgcctgggagccgggcttccctctgtcgggggcatgaagatgaagctgtcttgccccccatcacctcccctccttttcccggtttcttccactaggtcccccgtcatgcgtgcccggaagagcagcttcaacgtgagtgatgtggcgcggccggaggctgccgggagccccccagaagaaggcgggtgcactgagggcacacctgccaaggaccacaggggtgagtgtccggcggggcccaggggcggacgctggctccctgcgacccaccctggcccttcaccagagacgcctctttctccagccgggcgaggacaccaggttcacaagtcatggccgctctcgatctcagactcggacagtgggctggaccccggccctggcgcaggtgagggaggctctctggcgggctggggtgtggagctgcctcctctcctgagcctcagggtttcatcacccaccggggtgatggagggggcccccctggctgggggagtctgaacagtcctgattcccgcccaggggactttaagaagttcgagcggacgtcatccagtggtaccatgtcgtccacggaggagctggtggacccagacggtggagccggggcttcagcctttgagcagggtgagggtcccctgacggggctggagagagaggggggtttggacacagtccatgggcctggccctgagctgccttggtgacaccggctgcctgtgctgcccgcagctgacctcaacggcatgacccccgagctgccggtggccgtgcccagtggaccgttccgccacgaggggctgtccaaggcggcccgtactcaccggctccggaagctccgcacgcccgccaagtgccgcgagtgcaacagctacgtctacttccagggtgctgagtgtgaagaggtgagtgggacgccccgacggacagctgggagccttcgggagcctttggggtgcccagcaccgccggcctgtgtgccctcaggaatgtccggcccagagcagggagcagtcggacgcctttggaaggaagcgaacggagggggtggggtgggctcttttagttctggggagcagggttggctctctgaggcagcgaggcagggggcagacctggagggtgaagagtcctggggctgtggccagaagacctggagggcaaaggccctggagctgtgtccagaaaaccaaggggcgggaaggagaggaggccacagggcaggcgggatcacccctggggtggaagccacgagccactgtccagcttgtgtttgcagaagctgccgtgtgggggctgtgagcgccccggggaggtggggtggagccgctgggggctgcgctgagctgggcgccccggggctgggctcactcactctggccgcccccagtgctgcctggcctgccacaagaaatgtctggagacgctggccatacagtgcgggcacaagaagctgcaaggccgcctgcagctgttcggccaggacttcagccacgcggcccgcagcgcccccgacggcgtgcccttcatcgtcaagaagtgcgtctgcgagatcgagcggcgggcgctgcgcaccaaggtgaggcgggggaggaagcggctcacagcgaggaggcgggagtgggccgaggctgatgggcctccccacccccgggctcccgcagggcatctaccgggtcaatggggtaaagacacgcgtggagaagctgtgccaggccttcgagaacggcaaggagctggtcgagctgtcgcaggcctcgccccacgacatcagcaacgtcctcaagctctacctgcgtcaggtgagacccaccggtggtggccaggcagagcctggaaggggcgtagccaggcaggaggaggcggggtgggggtccgggagctggagcaggactgagctggagcaggactggcgcaagcgggggcctggggaggacagggtgggcgggacagtgcctggcagggcagggctgaggctgggggcgtggtcacggtaggagcgaggcggggccagttctgcgccgaggcacggacagggacaggaggggcggggtggggcttggtcagcacgtggcaggggtgtggccacggcagaggcacacctgacgctgtgcgggggcggggccggggccggggctcggtggggcgtggccagagcaagatgggcgtgttcagcgcttggcagggacccgtatgaggctaggggcggggctgaggctagacaagtgcggggctggcggtggggcctgggcttggtggggcgaggctggggccaggggcgtggtcatccccggggaagggcgggactggggctaggggcgtggtcatgtctggggaagggcggagctgggctgggatgggagtgggaccagcacttcgcaggtggttgggaaggggtcagactatgctgagtggagccggagctcgttagggtacctgcagggcggggcgcgcgtggccagagcgagaaagggagtggagctgcgggcgtggcccgggtaggaggggcagggctcacgctgggctgggaaaggggactgacgccgctctgggtggaacccgagctcggtggggtgtggccagtgctctgtgggggtggggctgaggctgggggcgtggcaggcacacgtgggggctgggccaggcccaccaacacctgctgacccttgactctgcgcagcttcccgagccgctcatctccttccgcctctaccacgagctcgtagggctggccaaggacagcctgaaggcagaggccgaggccaaggcggcgtcccggggccggcaggacggctcggagagcgaggcagtggcggtggccctggcaggtcggctgcgggagctcctgcgggacctgccgcctgagaaccgggcctcgctgcagtacctgctgcgtcacctacgcaggtgagtcccggcatatggagtggagggcgcggggtcccgggagccgctcagcacctggcccctgcccaccccgcaggatcgtggaggtggagcaggacaacaagatgacccccgggaacctgggcatcgtgttcgggcccacgctgcttcggccacggcccaccgaggccaccgtgtccctctcctccctggtggattatccccatcaggcccgcgtcatcgagactctcatcgtccactacggcctggtcttcgaggaggagccggaggagacccccgggggccaggtgagggtgtgggcctgaccggggctggccactcggggcttggggagcagggggcgctgctggggacagtcgttgtcggatgaagcccaaggaaccacagggagataatttggtttggacagggctgttcgggaggccactgtctttttgtgtcttttatgcaaaaaactcagcgaggtctgcattgaatctggcagaggtgcaaaggctctgcggccgcccctccactctcccttggggctggccttgggcctcacccttcacccccagcttccttccccgtttcccatcccggtgctgcctgcagccacaagctccacgctggcccggtgtccacagcctgcccgagctgccactgcactccgccgcgaggtcaattccccgcttcagattttcttttctgggagttgtagtttcgctcctgctgcccaggctgaagtgcaatggggcgatctcagcccaccacaacctccgcttcccaggttcaagcgattctcctgcctcagtctcccgcgtagctgggactacaggcgccggccaccacacccggctaatttttgtatttttaacagagatggggtttcactttgttggccaggctggtctcgaactgctgacctcaagtgatccgcaccccccttggcctcctgaagtgctgggattacaggtgtgagccactgcacgcggcgtctcgtattctttcaatccatcttccctgggtgtttaggggctgcggtttctcgggtttgctcttggctgaggacagaccgcctgggcaacagcgggtgtcagtagctgttacgggctgtgtgggtgggtttgttaatttataacatggaaaatggagccccggcccctctatgacttccgttctgcacttgcaggacgagtcatccaaccagcgagctgaggtagtcgtccaggtgccgtacctggaggcgggcgaggcggtggtctacccgctgcaggaggcggcggcggacgggtgcagaggtgagtgtgtggctgcccgaacggccccaagggaggctggcgtgtgccacccatgggcgcaggtgccatgacctagttgtacacacgtggcagggtccacggtgctgcacattctgtggatttcgtctgccacggagaccacacctatgagctactcattcagtgtcctttaaccggctgcaaaaacaggcaaggcagtgccttttgaggtgcctaccccgcactcagaaaccagtaacgtgaacgtggggctgatgccttgtgaggctccaggtgcaccaggtcaggctaagtgcctttcctgcaggagcccgtttttctagagaagggcgtggggctgggagtttgacccacgtggggccagcaccacctgtcagaggcagctggccgagtgccgcatctagttatgggacacctgtgttgtctgtcttcacactgctgataaataaatacctgaggctgggcacggtggctcacgcctgtaatcctcgcactttgggaggacaaggcagatcacttgaggttaggagttcaagaccagcctgaccaacatggtgaaatcccatctctactaaaaatacaaaaattagacaggtgtggtggagggcacctgtaatcccagctactcaggaggctgaagcaggagaatcacttgaaccggggaggcagaggttgcactgagccaagatcatggcactgcactccagcccgggcaagagagagagactctgtctcaaaaagaaatacctgagactgggcaatttacaaaagaaagaggtttaatggagttacagttccatgtagctggggaggcctcacaatcatggcagaaagcaaagaggagcaagtcacatcttgcatggatggtggcaggcaaagggagagcttgtgtccggaaactccagtttttagaccatcagatcttgtgaaacccacgtactatcatgagaacagcccaggaaagacgcacctccaggattcaaccatcctccaccagctccctcccacaacacgtgggaattatgggagctacaagatgaggtttgggtggggacacagagccagaccctatcaacacctctctccttccgtttctccccttgtctctctctcctcctccccgccatgtctctccatctgtctgtccctccccttgtctctcctccatctctcctgtctctccccatctctcctgtctctccatctctctcccccctctcctgtctctccccatctctcctgtctgtccctccccttgtctctcctccatctctcctgtctgtctccccccgccatctgtctccctttcttagaatcccgagttgtgtccaacgattcggactcggacctagaggaggcctccgagctgctgtcctcatcggaggccagtgccctgggccacctcagcttcctggagcagcagcagagcgaggccagcctagaggtggcttctggcagccacagcggcagtgaggagcagctggaggccacagcccgggaggacggggacggggacgaggacggcccggcccagcagctctcaggattcaacaccaaccagtccaacaacgtgctgcaggccccactgccccccatgaggctccgtggcgggcggatgacactgggctcctgcagggaaaggcagccggaattcgtgtgagctggggtggggctgggaccacaggtggcttctctcttgcctgctcctgtccctccagcacgtcccctgcaccacggcatagcttaggtgcgccgtcctggggtcgctgccgagagcgcctggacttcgacgtcccaccagcgggcgcctcctcccagaggcttccaggagcacgagggccttgcggcacaggactgtgccctgtgctgtcccctgcaccccggctcagctgagctggggaacactgctgtcgtgtgaagtcacagtggccttgttggtgcccacagggctgtgtggatggaggaagctgtccctgcccagtgcatcccccaggtcatcacggggacgcaggaggcaggccctgccctgccctctcctcacaggtctgttgcagggactccagaaaccattctgggagccgtggatgggggcggagctggggtttggtgcagtttccagggtgcagtacagcagggcctgaatactggccctggactcccttttccagaacaccaggtgtggccacctggggctcaggtacacagtggggtctctcggaagccaccgtgtggttctttcacaggcacgtttattttgctgaaataaaaagtttttaatcgggtgttttctgtggcagctgcaagcttagaagattttctgtggcagctgcaagcttagaagaaggggccagggaggggacagagagagccccgtggcgtggccctgggcctccccctaggggagggatgtgtgaggaagggaaccccccgccacggggccccgcgaggtgggagcccgggtggtcttcaccacaggctgtgcagacggtcaggcatcgaatgacctcgtcacgtccacctgcagcccagggcagtccaggaaaacgttctcgatgacggacgtatcccccggctctaaggtttcgcacgtcagccccacatggccaccaagcactggaaacgtggcccatgcgcctgtggaactgcatttttttttttttttgagacagggtgtgaccctgtggcccaggctggagtacaggagcacaatcgtagctcactgcagcctcggcctcctgggctcaaatgatcctcccgcctcagcctcccaaagtgttgggattacaggtgtgagccactgtgcccaggtaatcttaaagttttttgtagaggtggggggtttctctgtgttgcccgggctggtcttttaactcctgagctcaagcgatcctccacttcctgggttcaagtgattctcctgccttagctcccaagtagctgggattacaggcatgcaccaccacgcccaggtaatttttgtattttttgcagtgatgggattttgccatgttggtcaggctggtctcgaactcccgacctcaggtgatccgcccacctcggcctcccaaagtgctgggattacaggcgtgagccaccgcgcccggccacctccagaattttctcatcttcccaaactaaaactgtgcacatgacacactctgtcccctccctcctccccagccctgggaacccccatccccacccaactccccagtcccgggaacccccatcctacttccagtctctgacgactctagtgacctcctaggagtgacatcagtgtttgtccctttgggtctggcttgctttggccaagacaattttgaaaaaagtacatttggagagaaggggaagcactgtccccatcacacacacagtccgcggcctggggatctggggaccctgctgcacagaacagtgggcgcgttacagaccaccgaccgcccgagggtgaattacatcttaataaagctactgtgagagaaccacgtggctaggttaaacttgggcaggcgaggccttctgaaatcagacagtaagcaaacggggaagtagagccagatcccaaacgtctgtaagaggaactggccgcaaaccacagctgcacaagccagagaacaactccacaccctcacgggaagggaagagacagacacgctcacgccttacccaggagcacgaagtgggagggcagggcgagggcctggggagacactgacccctgaagccagcgcgaggagggcacacctgccaggctgacctcgtgtgcttggggtgaggcaaggccacctgctggaaaccttgttagtcggcctggtttctgtatcaagcaaatttatttgctcaaaacatctttaccatttgaaaacacccaacctcctacaacaaccgagaactccagagctggcatctcgcaccctggtggcttgagcgcgtgcatggctgtgaatggagtaaagagccgaggccgggcgggggccgccacgcatcagggcccccgagggagggaagacgaggggtggaaggccgagggcccaggaggaagcagtggctggtgggagacccggaccccaaacccccaacagaggggacccagcgtggtctgggtgaagacccggcaccagctgcccccaggtgacctccctctgggggccttgttccttctgaggctgcatctcgcacaaatccacaggtgaatggggcgggctgggccacaggaagcctcaccccaggacgggagaacgtgggtggaggccacctgccttggggagtccagaggagcagcagccgtgagagctgtgggggccggattctggcagggcaggggcgtttgtcctgcagggatgggggtcgctgtgtgtccgcctctaggggctaggaaagggggagagtggtcacacgacaggggcagatccagtatgcccaggacagcacaacgcccaccgaacgtgacggggtgcgggaggcctggcaggaggcggcccaggccgcagtgcagaggccggacggctcccttgtgcccagcggtcacacaggcgtgggcagtagctctgacctcaaaggaaccgtgccagcgtcagaccaggccaagccccacccctgggctgagtgtgaagtggggcggcctgcaggacagcagctcgccatgaccagagtccaggggaagctgggaggctctcgccatgggcagaggctgtcccgctcctgagactccggccagtccctcccaaggtgcccactcagggaagggttggcctgaagctgtgcctcctctctcagctctggggtctctgggcaggtttctaaaccctcttctggaaagtcccgccgcacaactgccctgcaggtgaacgtctcctgcttctaaggtgggtcagcggcggagagacgcacgccccgcgtaccaggactctcccgtccaggcgcacagccccaagagctgcagcctacggtcgggtggggtctgggggtctgggggtgtcctgggagcgcctggtggcccagctgggctggtgctaggagggtcttgctgccggacaaagcaagaacagccctgcacaccgacggaggggacgacacccctgcctctgaccccacctcagtgcctgtccctcggccgtctcacctgtcaggcggtagctactgcaccagccggtaggtgatgtacctgccagccgtctcactgggccggatgatcttcaccacctgcagagacagagagcaggggctgcgaatgcttgaggggtctcactgcagtcaccagacagcaggcgggcagcacacgggctggggatggccggcaggggtccgagatggctgaccctgggctgtgggacccgctccctgggaacctgggtcacgctcttctctgggcccagtggccctggctttaagagggggatattgggggtgtggtctcgaggtcccctccaggccctggatcaagggggaggggctgtcggggagggacagaagcccccttctccgagtggtcagctcagagcagccccagggccccttctccccacagggctcacctgcccacgctttatcccaaagtagcgcgccacagggtcccccgcctggatcctgggcagctggttctctcggagcttactgcgaagcaccgtcaggaaaatgccagacagggccgttgggggggcaggggtgtgtgtggggggggaacgcggaagtctcgagggacagggaggggcggggccggtggggctggaaaggatactatcgggccagcagctctgtcacctcctccttggtcatgacgacgtgctcagggactagctgccgagagaggaagccaccaggcatcaccaagggctggtgagaccccacgtggctcccaggtgccaccacagcccctgcgccttcagacggacaagagccctgaaccccaccccgatccccggcactcagggagcccacccaccccaccctggctccacaggcgggggacggagtcacagctcctggggcttctgaggcagacgggctgggcacagccacctcctgctgggactcctcctgtcccagcactagggtccctccacactcccagcagtcccgattctacaggctggggtgggcccgggatctgcatttttttttttttttttttttttgagatggagtcttgctctgtctcccaggctggagtgcagtggcacaatctcggctccccgagtagctgggactacaggcgctcgccaccacgcctggctaatttttttgtatttttagtagagacggggtttcaccgtgttagccaggatggtctggaactcctgacctcgtgatccgcccgcctcggcctcccaaagtgctgggattacatgtgtgagccaccgcgcccggccgggatctgcatttctaggaagctcccgggttcggctgctgcaggcccagggccaccctttgagaaccctgtcctccatgcactaataggaacacctgccctgggccccagatcccacatcttcctggccacccacaaacgctgcatctctgccggccccacgcaggcgggattccgcggcgcgcgcccacctcgtgctccgtgatgttgatgagcagctcctgctgcagaaactgctccaggatgtacttgggggccatgtcgaccagggactggaagagagcggctctaaggcacggcccggaggggcccagacaaccccaaccccatttcctgcctcaagctacctggggcttactcgtgtgccccaacaacacacccacgtcgtgaatcagaaaaccccaccgccagcccaggagccttcaacagcccgcccctccccagcctctctgctcatcgagagcctcatccagcagtgaagtggccgtggaaactcggatgtgtttccatccatcacacgcttccaggggcggccctcagagctggcagggcgacctcttccccatacaggggtgctgctctgtgtggctgcgtgaaccccacagctggtgggccagggactaaactgctctgctgactgcccgtcacagcacagcagcctggctccagagtgtccgacagacagacggggaacacggataggcccctggaggaccccgtgccgggcctcctctgcaagtccccctggacatcagctcaggataaagaacctccggctcctggaatctgcaccaggccgagggctggagcccacaggagctggcgagaggcacagtgccctccgccctgacgcccctcctgagagctgggggaggacggcggctgcctggggtggggcccatggacgcggtgggagggaggcggtcggggcttgccggacatcccggccacatcctccagggcaccctggctggcctggcccaaagcccaaggcacgtgggccgcctgtgggtactgcttgcgggaggaggctggggagggggagaggctggcggggtggggcaggggtgcccacctgcttggcggagggtgtcatgccctgctgcaccacgatgagagcccgtgtgatgttctcctcctgcatgcgctggcagtacaccttgatggtcttgatgcccaccttgggctcctctgcagacagagagtgtgctggcctgcacgagcctgggccctcgtggccctcgcccacccagagcccagagcacccaggttccagccccattccacacaggtgtctctcctgctcgggcctcggcttccgcgtttgcaaaacgaggcctgagttgcaggatcccaggacaggggaagagagggctgaaacctctcattcacccggagacagggacagggggctgacacccctcagtcacccagagaccagggagaagcagagaccttcgactctgagaggctcccaccctgggcagttctggggaggcgggtgactcagcaccaacctctccaacaagcagacctcacaccccaggacgctctctttaagaagcatcacctgaggccgggtgcggtggctcacacctgtaatcctagcactttgggaggctgaggcaggtggatcacttgaagtcaacagttctaaaccggcctggccaacatggtgaaacccggtctctattaacaatacaggatgggcgcggtggctcgcacctgtaatcccagcactttgggaggtcaaggtgggcagatcacgatgtcaggagatcgagaccaccctggctaacaaggtgaaatcccgtttctactaaaaatacaaaaaattagcccacgcccgcagtcccagctactcgggaggctgaggcaggagaatggcgtgaacccgggaggcagagcttgcagtgggcagagattgcgccactgcactccagcctgggcaacagagcaagactctgtctcaaaaaaattaattaattaattaataaacaatacaaaaagaaaaagtagccaggtgagatggtgtatgcctgtaaacctagctttttgggaggctgaggtggaaggattgtttgaacctgggaggtggaggttgcagtgagctgagattgcgccactgcacactccagcctgggtgacagagggagactcagtctcaaaaaaaaaaaaaaaaaaaaagactgggcgcggtggctcacgcctgtaatcccagcactttgggaggccgaggcgggcggatcacctgagattaggagtttgaaagcagtctagccaacatggtgaaacctcatctctactaaaatgcaaagaaaaactagccaggcgtggtggtgggtgcctgtaatctcagctactcaagctgaggcaggagaatcgcttgaactcaggaggtggaggctgcagcaagccgagatggcaccactgcactccagcctgggcgacagattgagactctttttcaaaaaacaaaaacaaaaaaaaaacaaaaaaacccagcagcgtcaccaggtccggttggcagacgtgctccgtcaccccactgattaattctgggcgtggggctgcgcccctaaggcgcttgcaatcccccaaccgctgagggctttagagccatactagggaggcagacaggtgcggagacttccgcaaagcaggtgctgaaaccgagggtcccaggggtcctgggaaaagaggcccgagcacaagctcgagggacgagtaccggacgctgacaggggagagggggcatggggtgcggaggaatgggctggggcgggcaggggccgcagctcacaaggaggctgcgctgacccagacggggcctcctgggccaggccaagaagctggaagtgcacccaacggccaggatgggggagccaagggacactagggcaaaggacatggggggctgggggtgagtggggaggcccttgtgactctcctcgttggcaggaagagagaaggggactgagagggaaactagaaagaagctgagcatgagaggggtcagagatcaacggcatcacccacagcaaggaaggggaggggagttttcctcccagactgggcagagagacaaatgctgggcaccaggcgagtgggggtgggtgctagcgaccggctcctcggcaggtgctctggtggcttcaccggaactcccccgggacccgctgctcacctggaaagaacacaaacatctggtcggtggggtcatcgttgtgggccaccagcacggtgaggtccgtgcgccgcggccgcccctcactcggcttgtccccagattgggctttgaactcctccagggtctggtcaagctcgtcctgggtcaccagatagccacggtcgtggcacagctgcagagagaaagaaccagctgaccccagggcagagagaggaaggcggccaaagctcgtgacccggaagtcagacctgcggctgctgcagaggacagaggtgaacagcaaacgggatgaacactcactgtgtgctccatgacagccaccccggcccccacagcctcacaccacaggatgggaccagtatgatcctgagaggctcccagagatgtccagccttgaccaagaccgtctgtccacccagcctcacagaaacctggcagggagcaaagccctccaaaccactttgcagagctaccctaaaggcagggacaaaggcggggcgcggaggctcacgcccgtgatcccagtacttagggaggctgaggcaggagggttgctggaggccagttcaaggatgcagtgagctatgattgcaccactgcactgcagcctgggcgacagaatgaaaccctatctcttaaaaaaaaaaaatgacagggaccgaaacagatgtgacttcaggctgacaatgtttgaggatcggagaaagaagaatcaggctgcggggggcttcgctgaggacaagggcaaagggtgggaagcaagacaaagcaaaagctctcaaacggccccaatggctgaggcaataccctgaaccgcaggtcctcaggcctgtgcccggcttccaaaccggactcgacccagtggcctccatctgccccagaccccaaggcacgggttccgagctccacgtccccatcgaaagccccagctcgcccgctgcttcccaaccaccaactctgccagcctcggatgctgaagactccatggggttcaggacgcaaggacaaatagcgacgctgaatcacagagaagggcagagtctgggggcgccccccgtccccattcgcggcttcctcctcctctcgccgccacgcgcgccgcaccagcccaagccgcccacccacccctaagcaccgcacccagacgtctcgaaaccccctcccttccccgctgccggctcaggtcgggtccagcgcctggtatccccggcgacctctgggcctcccgtatcggcccggcccttcatcgctgctgctccgacgagagtacgaggagacgccgtgctcgaccccacctcgggcccctacacccgccgcccgcgcccccgcccccaacaccaggcgcggctcacctgcatgatggtcttgcggattttccagagccggtacgtctcctcctcgtcgtccatggcagcctccgccgccgccgccgctcgcaccccttctccgcgcgagaacccgcgcggactgcgcctgcgccgaatccgaatcaggccccctccgcctaaccccgccccgcgctggtctgtcgtcggcgaatgcctgaatgcagcaacgtctcggatcggcagcgccaagggcagcccgagccttacgagagcggcagttggctgagcgagtctctcgcctccgtagttctcgtgtgtctttggccgcacagcctctcgggagttgtagtttccgttcaactccc

SEQ ID NO: 1488 - DNA, 134 bp, Homo sapiens
gtggtgggtgcctgtactcccagttactcgggaggctgaggcaggagaatcacttgaacccgggaggcggaggttgcagtgagccgagatcgcaccactgcactccagcctgggtgacagagcaagactccatc

SEQ ID NO: 1489 - DNA, 22452 bp, Homo sapiens; identical to SEQ ID NO: 1487

SEQ ID NO: 1490 - DNA, 134 bp, Homo sapiens; identical to SEQ ID NO: 1488

SEQ ID NO: 1491 - DNA, 4736 bp, Homo sapiens
aggacactgtacatacagggcgagcggcggctggacttcatgggttggctgggggccatccagaaagcagccgccagcatgggggacacgctgtcggagcagcagcttggggactcggatatcccggtgatcgtgtaccgctgtgtggactacatcacgcagtgcggtgagccctgcccctagggtgccagccccgcccctcccggagagccgcctcccgccccagagctgcgcggccccgccccatgactctatgcctcaggccccgaacgcttggccccgcccctccctaggcctgacctccgagggcatctaccgcaagtgtgggcagacatcgaagacacagcggctgctggagagcctgcggcaggatgcgcgctctgtgcacctcaaggagggcgagcagcacgtggatgatgtttcctcggcgctcaagcgcttcctgcgcgacctgcctgatgggctcttcactcgcgcccagcgcctaacctggctggaggcctcaggtgggccctgcagcccgtgcccagcctcctcctcctccacccatccctccggactcctgcgcccttcccttgtggcacttgcactaggcttaccctaacccacaggctccagttgcctgcctctgcttctcattcccatcgccgctccatacagagccaggggccctggaagaccgagagttccttaccctggttgaatgcctggcctgcattgacttggagggcacagggactgctgtcacccaccatgagaggcacagcagcccaggcggggtggggggaagatagttacagggggtttctgacttgatttatctttcccacccagagattgaggacgaggaggagaaggtctccaggtaccgagagctgctggtgcggctgccccctgtcaaccgggccacagtgaaggcccttatcagccacctgtactggtgagggacgataccattgtgagattctggggggatgggatgaaggttcttctacccccaccctggctgactaccctcctctgggagccagctgggcttttgcaccaagtgctgactgtgatctgccctaacattggatatttgtagagcagggttccccagtccccaggccacagaccagtacaggttcgtggcctgttaggaaccaggctgcacagcaggaggtgagtggtgggtgaacaagtgttactgcctgagctctgcctcctgtcagatcagccgcggcattagattctcaaaggatcggaactctattgtgaaccgtgcatgggaggtggcgcgctccttatgagaatctaatgcctctgaaaccatcccctgccccccgaccctgtccttggaaaaattgtcttccatgaaaccaatcccttctgccagaactgttggggaccactgttgtagaggatttttccaactggggccagggtaccttgtctggatctcccagcttcccagtcctgctcctaccaggacccaagatatggccagaaaaactgttcctaccctgttaaacagtggtcccctctgaccagaccagtcttggacctgtcagaaattaatagggtgagatgggaagctctggcctgactcctcactcaaagccctcctcctcccctctccagtgttcagtgcttctcagacacgaaccagatgaacgtgcacaacctggcaattgtgtttgggcccacgctcttccagacagatgggcaggactacaaggctggccgtgtggtggaagacctcattaaccactatgtggtggtgtttagtgtgcgtccctggccagtgggcagtggagggcaggggtgatccttgcagatgacggtgaccacctgtccctgcctctcgccccttcccaggtggatgaggaagagctcaggaagcagcgggaggagatcactgccattgtgaagatgcgcgtggctggcactgccagtgggacccaggtgaaggctggagcctgggtggggggcttggacctgccacctgcacccatttcctaggcccccagctgagccctgtctccctgcagcatgccggtgacttcatctgcacagtgtatctggaagagaagaaggcagagactgagcagcatatcaaggtaggtgctgggacctagaagccaaggggctagagaatcaggctgggccaggtacaggctcagatggccaggggagcagtgcttctaccccgaggagaggaccagtttgggacctgtatctggctggtgctggggtctgctcctaaggaccactcagaaatacccctctctatcccaggactccagaagggcctgagaaggatgggctcaggctctgagtcacatagcaaggttgtggcagagcaggggctaggcacaggcaggctaatctcctccttggtccttgcaggtcccagcatccatgactgctgaggagctcaccctggagatcctggatcgccggaacgtgggcatcagggagaaggactattggacctgctttgaggtcaacgagagggaggaggcaggtgggtgacgctgggcttgtgcagggtgtggtatggcttgtcttgtctcagctgtagccccagtctgtcctcccctaccctgcacatgaggatgggtggtgaaaagggctttgatgacatgttgctgtcacactgatctctgtgatggtggtgatagggtgctggcagggattgaggttatggctgtcatgtggctgatagaagatgtcagtgacagtggtgatggttgaggtgagaaatgtattttatggtaaaggtggtcttgatggcagtggaggatgaggctgtatctgttcatttgttttactatatttgttgagtgccaggcactgggctagggagccacacacacagtccctatcctcgtgggggttagtctggtgtgggacggaggcattagtctaatgatcataccaataaatgttcaactacagatgcattaactgctgtggaggaaagacccttggcattgccaggtcttccctgagccaggatgggaaggaagagtaggggttacttggtgaagaaggcaaaagccctgtggtgggcagaggcacagccctttcaaggagacgagggcagtgagggggtggtgacatgggtggggctggagatcgaggcagaggcagccatgcagggcctagcagcaatgcaagaccatcggagggctagtgaatggcagtttaagaagattgctactcgctgatgggtggggagagggaaattagagcacactttgaaggccatggtttcgtccaaggagaaggcggtaatgtgggctggggtggcagcagtggagatagacagagcagagagattcgacgtgtggattgggagagggaggaggggtttgtttctgagttgagcagcctggcgggtggtggtggtgtttccctgatgggggccacagggagggtgggatgggaggcagggggtggagatcatgggcatggttttgcacatgttgaatttgagcagctttggtcacagccaggtgtgtcaagcctgaagcttggtcatgggaagggtggtcatgatggtggtgttttgtgtcgtggcacttgcatatggttggagtggacaggggatgtgtaggtgatatgtgcccatctgccagcctttggtggtatcgggccatgtggtcccagtgacggtaggtgtgacctctccccagagcgccccctgcactttgcggagaaggtgctgcccatcctgcacgggctgggcacggacagccacctggtggtgaagaagcaccaggccatggaggccatgctgctgtacctgggtaggtggtgcctgcagggtggccaggctccgggtggtcctctcttccagagccagggtgggacctggtggtgccaggtaggaacagctcagacagagggcgccaagtgggtgggcctctatggagaggctggggcaggatggggcagcttccttcatcctgggacccagccccgggtaggggttggtgcagcctgtgcccactccagtcccaccccccagccagccgtgtcggtgacaccaagcatggcatgatgaagttccgtgaggaccgcagcctcctgggcctgggcctgccctcaggtggcttccacgatcgctacttcatcctcaacagcagctgcttgcggctctacaaggaggtccgggtaagtggccccgctgggttctgccccagggtgggcacctgtacacctgaatgtgctcagagattccccttggtctgcaagtggaaatattcccgttacaggctctcaggatggcacagcagtgggggagaactgtagactctcaagacccctcctgctgtggccctggacggccactctagtgtgccctgtagccccactaagccctggcacccggatgccatcacaccactccatgcccatgctctgtctcactgtgcctgtgccttatcactgcatccacaggaacctgttacttgatgacagccccaagttgtgcatgcatgccttgtcatatcgtatgtcatatgcctcccgggccacccttctccctcattctgtccacatgcaggtgttctcccaacccagactccatttgacaccctccaccttctgcacatacatgccatacacacaccccaaccccacacatcactgcacatgctgtcctggctctagacctgggacttcttccataaccctgatcctctatcaaacagagccagaggccgtggagcggggcccctgagacc

SEQ ID NO: 1492 - DNA, 16518 bp, Homo sapiens
actaaggaggaggagtcattgctgccatcattatcatcccctccccagccacagtctgaggagcccctgtccaccctcccccaggggcctccccagcctccctctccacctccctgccccccggagatacctccaaagccggtacgcctgttcccagagttcggtgagtgctgcagccaggagatggggctctgggtggatggcctgggatccctggaatcaggcctctggaaggtatgcaaggatcacactcctttctgtgcaagcctgccaccagcccactgtgtggccccgggcaggtcacagcctccctgagcgctattctcttcatcctcacaatggagacagcacccacctctctggcctcctgaccgttaagtgtggggccatggccggctttgccagttacccatggtctgattttccatggtgttgggtggtttgcttttcttttttttttttttttttgagatggagtctcgctctgtcgcccaggctggagtgcagtggtgcaatctccgcccactgcaagctctgcctcctgggttcacgcccttctcctgcctcagcctcccgagtagctgggactacaggcgcccgccaccatacctggctaattttttgtatttttagtagagacggggtttcaccgtgttagccaggatggtctcgatctcctgagttcgtgatctgcccacctcagcctcccaaagtgctgggattacaggcatgagccaccgcgcctggccagaggtggtttgcttttcctggggttggccacatttgttgattcttgttgcctttgacagtccttaccccaacccccaagctcaccactggctcggacctccttgtggtgtcccagcttctcctctgccaccctttagtactgtcctatgaggcctgggggtataaatcgcacttcctgtcccctgtgcctttttttgaaagccagggggaggtggggatgggggtcttggcatgggggaggctttgtgaagcccagtgtggtgccccaggagaggaggccaggccccttgccctgaggccccccaacccctctctcaccagatgactctgactacgatgaggtcccagaggaggggccgggggccccagccagagtgatgaccaagaaggtggggccaggcatgggactgtctgcctgtcagggtgttgtgggggtgcccagctgcctgtcagaccctgaggactaccagacagagagtgggcagccatttcccgggaggcttccccttcccccacctcactctcttgccatacgggggtcaggagtcacgtgtagccacagcgctctgggccaggggtcggggctctggtgtggctcccccaggccctggctgtatgtgggtgggcatgtggcctccccccaccctgtgtgttaggaactcgtgtcctgtcccggagtgtctgtctctgtttcacttcttgtgttcccgtgtctgtctgtcttgcatccctagcccgcagtctttttctctgtccctttatctttctgtttttgtctgtgtcctaggtcggtttctgccactggctctcctgtccctgtgatctgggtctctgtgtggtctccgctggcagggggaggggagtgtgaggaaacagaactaaaagtgctgggctgtgtgggtcggggctgtgtggacagagggggcgtggcagccccgggtgggtgtgatctgtggcttgaagggaaggatgacgctgagtgggtctcgggggcaggaggagcccccaccgagccgagtcccacgggccgtgcgcgtggccagtctgctgagcgagggagaggaactgtctggggacgaccaaggggatgaggaagaggatgaccacgcctatgagggcgtccccaagtgagtgtccggccaccctccttcccactgagcccaacctcagcccgccccctccttgcctcctcagcccggccccccatcccctcatctctcgctagtggcggatggcataccagcagcctgagcttgtccttgcccagcacaatagctgcgccacaccccatggacgggccgcctgggggctccacccccgtcacaccagtcatcaaggctggctggctggacaagaacccaccgcaggggtgagtgaggcctcttgggtcctgctgtgctctgcatgggggggtggggggcagtgtccaggaccccaggacactggtatcactcactgatctgaaaaccagaagggcctgcgatgatttgcacaggtctccctccaggcacactgtgaccactgatgattccctccagacccattttattgccctgaaaattgggagatcgctgggcatagtggctcactcctgtaatctctgcacttgagatactgagatgggaggtttgcttgaggccaggagtttgagaccactctgggcaacatggcgagacctcgtctctacaaataaatttaaaaactagccaggtgcagtggctcatgcctgtagttttggctacttgggagactgaggtgggagaagcacttgagcccaggcatctgaggctgtagtgagctaggcctgtactactgccttccagcctgtgtggcagagtgagaccctgtctcaaaaaaaaaaaaaaaaaaagagatgtgctactttgagtctgacttcagtcactcttgctgtaaagtccatcttcttgccagtggccatttgggattcttcctccctagaacctggctgatcctcactctgagtgtggcttctgagggctggggtggtcctggaacctgtcctcctacccccggtcatttgcttgttgtccctctccctctccagatcttacatctatcagaaacgatgggtgagactggatactgatcacctgcgatactttgacagtaacaaggtgaggcctgcatcagtcctgacgcgacccctgctccagcctaggctggccccaacactggagcgaggtggcgtccctccccagaggagtcctcgccagagttctaagtctgaccccttaacccatgtcctcctggccctctgcctgctgagggctgcagtcagggtcagcacagggtcttgtctctaaccagctgcaggagacagggctgcagacttcattttggctgaggctgggggagtcagcgaggtgctgggtcccaaaatatagttcctgtctctcccccaggacgcttactctaagcgctttatctctgtggcctgcatctcccacgtggctgccatcggggaccagaagtttgaagtgatcacaaacaaccgaacctttgccttccgggcagagagtgatggtggggagtgtggggtgttgtgtgtgtgtgtagaagagggtagagaagactggaagtttgggcagaggagggggaagagagtcatggtgcatctgccctctcacatcacatccggggaggcatgctgcctttgtgaggtgggcagaggaagggggcaccctctgtgaccggctctgtgcttggcacggtcactgactcctcagaaccacacaatcagcgggagcaggcttggaggggtgaggtcacttgcccagcatcagtggcatagctgggattggagcctgagctcgttcaagtcagagaagtcaagcaaaatgatgggggcatctgagtgggctttctggaggaggtgttgcatgaggagcctagggccaggagacccctgaggggctccctgcaaccttgggcttactcctctacccttctcctgcagtggagcggaaggagtggatgcaggccctgcagcaggccatggctgagcagcgtgcccgggcccggctctctagcgcttatctgctgggagttccaggctcagagcagcctgaccgcgctggcagcctggagcttcgtggcttcaagaataagctgtacgtggccgtggtcggggacaaagtgcagctctacaagaatctagaggtgctaaggggtcatggaacctctcccctgcccatgtccacctaccctgccccaggctgacctagggccttagccctgccttttctgttccctcttttcctgcactgggcccagccctttgcctggatatgtcctcgctcccccaagttctgaccacttcccccaggctctgagcactgccctccagtccctgccctggcccttgctcccccgcacctctgttcattgctgtgtgggccctgaacctgcagccccttaccctgcccagcctcccatgtcccctgctgtctccctcctgggcaccccccccagtccctgagttgcaccaccttcccttcctctccctgtcccaagcctcacgccctgcccccaaagccttgccctcatcccgtcccatctgccctccaggagtaccacctgggcattggcatcaccttcatcgacatgagcgtgggcaacgtgaaggaagtggaccggcgcagcttcgacctcaccacgccctaccgcatcttcaggtgaccctccatcttcttggctcaccggcatcctcactccttcctaatgttttccttttgcgcgacgtgggaagctgccccttcctatgggatgggttccctcaccctgccccgccctgccccacctgtggagcccctctcccgtcacttgctaaccctctctgatctccttccctcctgagaggtcttactctcccctgtgctgcttggcaactgctgtcctcccctgcccgccatgctgctcaggggttgcccatctggcctcctgctcccactgcccctgccccactatccctgcgcctacgccacccctggagagtgctcttgtctctcatgaggctgctcctcagtccttgtctctgggccaccaagcctctgccatcttggtttcctctgacctcagctgttcattggtgtctttctctgtcctctgccctctccctgggcagccttgcccactcccaggccttcagccgctacctctgaggtactgaactatgcctgggttcgaatcctgggtccaccactgactagctgtgtgacctgggaaatcacttggcctctgtgtgcctcagtttcctggggaagtgtttgtaatactgggtagtaactgctcaataaacactagcatcactcccaacccttccacttctctgctcttagtccaggtgtctgtctccagcgggatctttctgctgagctctggcctgcatatctgacagctgtgggcatctccccttttcagctccctgttcttcccagaggcctgtctctccaaccaagaaggaaggactcgtgcctttcctttttttttttttttttttgctttttgagacagagtcttaggctctgtctcccaggctggtgtgcagtggcacgatctcggctcactgcaacctctgcctccaggttcaagtgattctcctgcttcagcctccccaagtagctgggattacaggtgcacgctaccacgcccggctaatttttgtatatttagtagagacagggttttgccgtgttggtcaggctggtctcgaactcctgacctcaggtgatccacccacctcggcctcccaaagtgccgggattacaggggtgagccaccacacctggcctgtgccattcctttttaccccatctggccccatccctctgctgtcacccttctagcccaggcctggtgggcctttggccccagcgcctgcctcctcactcttgggccgcccgtgcctgtccagcctctttactccaactgctttgacttctgcgggagccttatatttgagagctaagtttttatttgctcatttcttgcatttgaagttctctttgatgacatccttgccctgagattctttgccatagtccttaactaccacacagctgcagccccgcctgacgggcgttctctgattgtcagtctgagaggcctgtccgttcctgggtttcttgttgtcatcaaccctaaagaggtagacttagtgttctacacaaagggcctcccccagctggcatgagtggctcgttgcatttgggtgcaagcacaggaaggtgagcttggtgcttggctccacctttggcagttttgcgaattccacgtgctaggttgtggaggaggaggtctccagcacctccataaagtggcattaatggccatcacacctccagcagcgatgccttccttggttgtggcaatgggtcatgggtggagtagactcatggtcacatgtgtgactcggtggtggcagggaaagagccagaggggtctttttaaaactaaattttttcagggacagtcatcatttattgttcaaccagggcctcccaccctgaagagcagggcatgctatagcggccacaggtgtctcggtatgttgggccagtggagttctttgtggagtggggttatggagcatgtcacatttggggctgggacaggaatgaggatagggatggcggaggagtcttttaaagacatctctgtaccctcccctccttcctacttaaaccctctgtgggttctccattgtcctcagggtacactttgacttcctcttcctgatgcaggcctgtccctgtccatctcccacccttttctctgccagtctgcccttctgtctcctggaatgccccctgtgcaatcctgcccctttgcacatgctgttccctctgtctagactgtcctttcacctcttcacctggctcagcccttctgatctgtcgaatcttagctcaggcatcattttcttcccagcagccttcattctgcgggctgggcagagccccccactgggctcccctgcccccatacgctcttgtgttcctgttgtccttgcctttgtccacacctaccttccctaccagagtgggatgcctcactcttttgcctaagcgctcccaacaccttgtcccccacttcattctgtgcatcctcatgctgcccccaaatccctctgagtccatccccactaatctccccacccctatgtccccagcttctctgctgactcagagctagagaaggagcagtggttggaggccatgcagggagccatcgctgaggccctgtctacctcggaggtggccgagcgcatctgggctgcagcccccaacaggttctgtgctgactgcggggctcctcagcctgactgggcctccatcaacctctgtgttgttatctgcaagcgctgtgcaggtgtgtgcatgggggtcggggcaccaggcagaggcatggcggggttggccagttgggatggcaggtatcctatctggaggagggcctggagcggagacagcactcagagagctgctgttgatgaggcttctcctgcacacctgtgattagctttgagtccttacattgccaggcaggggttcaacttctcccatcacgggtggggacacggaggcacagggagaggaaatggcttgttcagggtcacctggcaagtaagtgagcccagatttgagcccaggcttgttggggtctggtgttcctctcatgtcagaagaatagggaaggccaggcaagaggagttggcaggggccaggcagggctttgcatgcagagggaggagctggtttttgtctggagggcgatgggaggcggggacatggtcagatttgtgggtcagactctggctggtgggtgaaagctgagttagaggggcaagactggagaccagtgaggaggctgccataggatccaggagagggaggaggaggaagcctggcctggggaagccgtgagcatttgagggctgttcaggatctatggtggaaaactctctgactgactggatgaggaagatgaaatgcgagagggttgagcccaaggttcattcatctgctcaatcgaggccactcattctggccactgtgtgccagatgctggggattctgtcctcttgggagctgacgtagcccaggtggtggctgtgggctgctggaggtggggatccaggtggaggagcaagtctagggaagtgtgctggggaggccctctctgaggaggtgacatgccagctgagatctgaatggcaggaaggagtggccatgaggacatgggtgatgacagtctgggtagaaagatgaaggaggggaagcaggtaaggagttgtgatctaattctgggagccactggagggtgaaagcagggattagaagtcagggatttacattttaaagagatcacctctggcagggctttgttaagagtggcctgcaagaggccaagcatggttccagggggccagttgcagagggctggtgcaggagcccaggcaaggattacggggctcagtcctgccctgtggggagcaagagtacacggctggattccagagctgccagcaggcctaccccctggggcctgcctgtggcctctcatccctgcctgtcccagtagacactgggggtgggtaagtgctcccgtgaagggggggcccaggtgattctgggtctggccctgtgtctacaggggagcaccgtggcctgggcgctggcgtctccaaggtgcggagcctgaagatggacaggaaggtgtggacagaaacacttatcgaggtggggatgcccctgcttgccaccgatacttggggtctgccccattcaacagctgtctgggtctcccagccccctccctatctcagtgaccacagcaccttggagctggaagagaccctttgtgataatctagtgggtggggatttcggaaaagcaatttttggcaaagtcagcaaactggccagtgagctaagaatgtttttatagttgtaaagtgttatttttttttaaagaaaaaaaaaggaagaaaatgcagcagagactgtatgtgttctgtaaagccgaaaataattactatttcgccctttagagaaagaatttgctaacttctgatctaatttcactgtcatccattgaatagatgtgtaaactgaggtcctgggcagggctgtaatctgcctgagattaccctgtaaatgcatattgaccaccatccctgcctctttccatcccacttctggctgacccagggccttctcccctaccttgcacagcccctcagaggccctcagcctccatttcatgtgaactcacatgtaccagtgggtatatatatgtgtgctgtgtgtgcacacacgtgtacatttatgcccctgtactggaaactcccaggtacccatatgtggtagatataggggagaacctgcaatgggagggtagacccaggctgcagactccagacacttggagtgtcacatccgtttctcacctccccacggtgtgtttggcacataagtgctaaggactttgcatatgttaattaactgactttcagaacaagccaggagttaggattagaataaccagtttacagccttgaagcccagggagagaaaataacttgctggaagacacagagtgaatcagtagtggcaaggacttttctgctttgttctgtgctgtgactccagcaccccatacaggacctgacaaggaggcaaggtggggggcctaggaaatggctgtggaatgaggagccgaatgaaggaactgattaccaaatgctggatccctgcactcacccagaatccacccccatccctcttgcccagagaggaatgtcagggataggagaggtttccaaaatccctgcccaccccattggctgacaggttaggcacccatccccagctgtcacagcctcaggaatgcagagctccagatgtggaactgggtggggcagcagcaaggcccctgggaccaggtgcaaggcctgaggcatccacctgtcagtctgctgactccctgtcctgtcactgagcctgagacctaggctcagagcccagtgctggtggcaggagcatccccagccaccagcaggccaggctgtcctcaccttccccattgggaaagtgggcagatggcctggctctcccagcccctttcctaacaacctcagaaaccaagtttctgcccggcacggcccctggctgtcagctggcccgtctgacctcctgcacacccccacagctcttcttacagctggggaatggcgctgggaaccgcttctgggcagccaacgtgccccccagtgaggccctgcagcccagcagcagccccagcacccggcggtgccacctggaggccaagtaccgtgagggcaagtaccgccgctaccacccgctctttggcaaccaggaggagctggacaaggtcagggcactgcagctctggggccccttgggaccacccccgtctttctgctgccctgttcctcatgctgtcttaacccatctcatctaccagctcagggagatgtcttggcatatggggaaactgatgtttggagggcagaagggccctgcctaagccatgtgaaaagttctggccatgcagggaggagccaggcctgacccttgggccaagggcacatccccagcatctgtctgtctctctcccaattcctcagtctcctgcaccccgtccggttgcttctgaatcctgccaaaaagagtgaacttgatggggatgctatttcctgtcaggctcatgaaaaacagctgggctgctctgacccatccccatccacaccccactcaagatgaggccccgcatgggccccaggccctgacaggctgggagccaagtcttaggccctgatctggctctgcctgagtgggaggcagccagctccgaggcaggggtatgccatttgtgacctctggttggccttcagcccctcccccaaaccgcccctcccaggcagactcagtccagctagaagcccggtgggagtcaggcctccacctcccagggacccaggcgtcctgctcccagcccaacccagtctagcctgcaagccaggagggcggcaactcccattggttgggagggctgggcaggcggtgaggaattcaaatgtgggaggaattagctacaaagcacaccccccccccggctcctccacaaggcagaaggagcttgagatcctctggaggctctggctgactgggcagctgtgtccaggcagccagcaggggtgaggccccgggcagctgggatcccctggcctctgctaggcagcccctgctcacccctcctccccttggcctctctcttccctctccttctctctttcttccttcctattctctctttcagtctgaggatggactgctccaggcctgggtgactccttccttttctttcctctcctcccccgtagcccctttccttgtgggccccctactccttcttgggctgaccctcccctgcctcttcctaggccctgtgtgctgcagtcaccaccacagacctggctgagacccaggcgctcctgggctgtggggctgggatcaactgcttctcgggggaccctgaggcccccacgcccctggctcttgcagagcaggcggggcagacgctgcagatggaattccttcggaacaaccggaccacaggtgagcgtggcagagggtgggggtccaccaggctgtgcagtgcctggtggggtttgatttacctgctgctctcaggccgtgatcgcagctcctcaagggcctgtgataaatcatgtgtgagctggggtgtgcttgggtttgcatgtcagtgtgtatttgtactacgtatgcatgttcctctgtgtctgtgtctctgtgactgttgatgacttccctgacttgcagtgtgggcccctcaggatggctggcagctgtgctggtgtttgtgcgcctctgagccccccggatttgtgtttctggggatgctgagagctttggagtacatgcgtgtgcagagtgtgtctgtgttgctgcgtgaggggtgctgagttacatttctccatgggtgggtcacccacctaggcagccctgtctactgccctgcttgggtggagctcaatcctgaacttggtttgggtaccattggctccctcttggggtgggtgaggaggggtcagtgggctgagcagcacagctcgtggcccaggcctggactctggggccacatcccaggactgagggtggagctcaatggctggggctctgggctcagggccatgggtgggcggggcacactgggctggagagagcccaggtgtccagggagacacaggagaccacccaactggcttgggcttggggacagatcaccgcccccccacggcgctgaccgtggggaacagggctgtagtcaggctgccaccttgagcttcccgctgtctgggacaatcctctttccagggattattattgagtttgcccaatgcccccctcatgccagtgtgcctggcctatgcctccaacctggagagtggggtggggcaggaatcagggaggcttcctggaaggggaggtgctggaactgggccttgggagtggagtgaatttccacaagtggggagaggtggagaaacagcctggacaagaccctgcaggtaggagggggagcttgaggctgccagttagggagctggggctgatgattcgaaagtgagcctgaatgcccaggccaggtgggagtgaggtggggacaccctcttgggtggccagcatgacctgccatcctttccccgcctacaaagaggtgcctcggctggactcgatgaagcccctggaaaagcactactcagttgtcctgccgaccgtgagccacagtggcttcctctacaagactgcctctgccggcaagctgctacaggaccgccgggcccgggaaggtgggtgccaccccagactctgctttagcccatggcatctggtcacggctgcagggctagggaagccagggctggccagactggtggactctggcagagtcaccctagagggcttcctggatatagtctgtggtacacagtaggtacttcctaaatgatcctggtgggagtgggggtagtgcatgacactgcagagcaggtcagtgccagagtttctttggactaaatgagcctttattgagcccctactggatatgggctctgctgagcatctggtagtaagagcctgtggctggtagggagtttgaggactgaacgaaagccctatccatctgatctcagccttccattcactccccaactcagaagaaaatccacaagagcccgcacagttggccaccacccccattacctctctgaaccacccccctaatcactctgccggtctcctcactgtttctcagacacgtcgtcacctaccaggatctttgcctgtgctgttccctctgcctgaaatgcattcccccaggtatctgcatggccagtccctcacttccgtcaggtctctgtttcagtatcactcctgcagagatgtcatctctgactaccttatgcaaaatagcaccccccatctctccctttacccttttgagatggagtttcgctcttgttgcccaggctggagtgcaatggcgcgatcttggctcaccgcaacctctgcctcccgggttcaagcaattctcctgcctcagcctcccgagtagctgggattacaggcatgcgccatcatgcctggctaatttagttagtagagatggggtttcaccatgttggtcaggttggtctcaaactcccgacctcaggtgatctgcccgccttggcctcccaaagtactgggattacaggcgtgagtcaccacgcctggctaccctgcattttcttcacaccacttacctggtactcatttgtccattaatgtacttatctatagattctctgtaccccactgggacataaactccttttggccaccactgcctgtagcccccagatcctagaacagtggctagcacacagtgggcacttggcaaatacctgcagaatgaaggatgactcaggcagagctggtgctcctggagggagcccacctgcggggacaggcctgaggacacattgctctcaaagagcacatgtcaggccctcacagacaggatgagagacagagtctgctgtgggaacattgtgaggtcattgctgacaacatccctcagcacctcctgcatgctttcctacggggacaaagccctccaactcccaaagagatttctttggaactccatgctgttcacaacctcattgccccaggtctgcctccctctgcctgacaatgtcatttatgtaacaactgcctgagtcatcctttttgccctggatgccaggaagctctgagccactgtaaagctcagtgctgtgaacggtacaagcctgcatggccatgacagcctatcctttccattacctttcctggtccagattcccatttctgtttcttttatgggaccttgccagtccttcagagccattgtagcaggaggcagagtacagagtgatagatgcttctggaaaaggaggttggggcatagaaggcttcctgtgacattcaggtggtgggtagaggggacaaggtttgcaaaagctgggagtgctgggtagggatgtgtgtgtccaggagtgacagagaggcagctggagagacgggcaggggtagacctggcagggccttgaatggcaggctgaggggcacagagtctgtcctgaggaccatggaatggttttggttagaggaaggatggggtctgattttagctagatcactctgggattttggaaggggctgctgcagaggcctgggggagcggatgacttgtgggctggctagcgtggtggggatgcagagaggtggatggatttagggaaaacttgagagaatgaagagctcatgggtcagatgggagcaggagccccgggaggatgcagaggtggttttcaggtggtggggggctccctgatggctcccctgcccaaattctccccagagttcagccggcgctggtgtgtccttggtgacggggtcctgagctactttgagaatgagcgggcagtgacccccaatggagagattcgggccagcgagattgtgtgcctggcagtgccccctcctgacacccatgggtgagtactcctgggcaaatcagactgtggttgctataaggtacaatcccccactggggagacagggaaatagacccagagaaggggaggacctccgcagagtcacacagcaaacggaggctgcacaagggccgactccagtctcttgaggccccagcccaagacttttccaccacctcttaggggaccagaataaggacaagcgccaaggcagtgcggagggggcagaggatggcggttgatggtgcgggttgggggtgggcccgtgctggatgaggtgggcctgagtcctggcctgtgtatttgcagctttgagcacacctttgaggtgtacacggagggagaacggctgtacctgtttgggctggagagtgcggagcaggctcatgagtgggtcaagtgtattgctaaggtgagcctggggtagcagggtgggtgtaagggtgtctgactggggaaggtggggcctcctggccaatcccatgtatcccagctcccccgtctagagagcagaagctagatgcagggcagcagacatggagcgggcctgtcccaccaagagcctactgtaatctgcagccctctgcggagttggtcagacctatcctagctctgcagaagaagggctgtgggccttgcactccataggtgctcaataagtgtttaacagtgaatgacagtcagagccatcttaggatggacagtgcggcctccagagggggtgtgctcctcgttcctggaggcgagcaagcagaggctggagggaagaggcagggaggccaccgggagagctctgcctcggggactagagccaggtgcctgtggggtcccctgtgctgtgagagcctgtgactttttatcattcacttctccgttgatcagttgtcttgtgcgcctcctgagagtcagccctcggagacctgggacccagatgaaccaggcttagtcctagctcttcagtagcacccatgtgggtgggggagacagctcccctgcgggtgtagttcaggcggcagcagcagtgtaaccagtgccacaacagagggcaagaatgctttggtgctgtgggggcccagagaagggccctccagaaggtgtctgggaaggctttccagaggcgggcacatctgagtgggtatgaagtggggcatggtacccaagttccatcactgggcttggttctgccttggggaagagaagagaaggcagctgggtgggaagagggcatgtgcctgtaagccaaggagctggggcattggggcaggcagtgccgttggctgatgctgtctcccccggcgcctctctgccaggcattcgtgcctcccctagccgaggatctgctggcccgggattttgagcggctgggacgcctaccctacaaagctggcctgagcctacagcgggcccaggagggctggttctctctcagtggctcggagctccgtgctgtcttcccggaggggccctgcgaagagccgctgcaactacggaaactgcaggagctttgtgcgtggaccagacctgggcccccagcctccagggcaccctatcctgggctcccaggcccccagcccttgcctggaaatctgaactctgcctggcctggccagagccgccatc

SEQ ID NO: 1493 - DNA, 1728 bp, Homo sapiens
  SITE (22): n equals a,t,g, or c
gaggctgtggaagccccccacnccgcctggcccagaccccagctcaccacagggtccagctccacactcagcactgcccggaagcagcccagcaacctctgtgcccgcaccaggtcagcactcggtgggtcctgcaggggccggtagcctgccactgggtaggtgccagagttaagccagcaacgccttatctgtggctcagacatgcctactccctctccactgcccaccccccaccccggggcctgggctctagggcagggctggtttgcatcacaacttgcccacttattctccctagggaggatgcttcacattcctcatctgttcagtggagacaagggcacccaaccaaccaggctgctgcgaggaaagttttcttcgacactctacatggccccccactaactctgcagcagccagggcctgccaccagcccatggcacccctggggtagggagcccctcatcccagcctccccaagagcttctgagcagcccacagccatcttcacaaaatgatatcgcagaggacggctgccaaagttgaaggccacggactccttgaaagagaggctgatggctgggaagtaggccatacccaggcccctggacaggttctcaaaggcagtgcccagtgatacaccgttcctggggagaagggtgggtctgtgagccagtgctaagcatgtggctgcccaccctcaggctatcaaactcagtctggccccttacagggcccaggaaactgggggcagtctggggaggccccaggggccaggcctgtgcatagagataggaaactcacaggcagaaggacagagtgccatcatccaggtcaatcaggcagctcacgatgtcccccgctgcccacgcctgccatgagaggaggcctcaccagatgcacagaagcccagcagcctgctgactctgaaccccagctgcgtttccagaaccacccaagggagactagccacaaggacaaaggacctgggtccctgacccttccctggtgccctgtagtcccttatggctgcccagtggctccaaataagctgtagtaacagtcatggggcggatgacccacaggggcttggctctcaccttgccataattcgttgtggtcacattccacttgcgcacgcggttgccatcataggcataggagttgtgtgtatctccaaccccctcctagggaggaaatgcctatgaggtccctggtgaggcaggcagggtctgggccagagcccaccaatcaccagccttggatgcatatggctctacagaagggaacagatgatctgagggaaagagtaagaggtattctctgagctggggtgcctgggattgggtgggacacgtttcttctccagagggcagtccaggttagttagggtcctaggcagttctgaggggatctggagacctgatgaggcctgtggcaggagaagctctccctgggcccagggaggggtcccctccccaacgtgtacctcctggttgaagcggcagctgatggtgcaccagccgatctgcatgagcccctgggaggagatgaggacctcgtagagccatttccctggaaagagctgagttagggccacgaggtggacaaagactgcctcttgcctcatgcctgggcccttaaactttctcctcactacctaggccacagcagggtaaggtctcacctttgtacacgcatgtggtagagcggatggtgccaaag

SEQ ID NO: 1494 - DNA, 4683 bp, Homo sapiens
tgtcctcacgggtcctctgctccacgctcagcgtgcggaccttcactttctccgaggtgctcagaggccgccgtggggtcatgaggctcacagccgctgtgctgaggaagcggttggctcggcccaaagttggagaactgagccagccgggccggggcaggggcagtggccccccaacagccagggcctgcatggggcgctgcagtgaagaaaggcggccaggaccagggctggctcagggttcccttggcccacggggctgcagaattgtgagggagggtccatgcctccacccacagcaaggcaccagcccagtgagaaaccctttgcctgcatggagcgggaagtggccctggatgagacccctgcccataagatacaggataagcccaacacaaatcccaccgcctgcccccactgcggcacctgggccatagctggggctggctcctcatcctcatctaggtcatccatggcggttgactggagctccagtgggtcgatcacaatgttggctttggaagcaaggtcatctgggaggaagagcaggagggttctcaggccagtggtggcgcaaggggccacagtggaagtgcccaggacggtgagagagcccagcacactgggcaggaggccttgcagagcccggtttagcaccgtatctgcccctcgcccctccgcctcctccacccagccttcactctgcatctcaagggccccgtctagctgccactcagtaacaggaggccttccccatcacacccttctttttcatttattttcaaattgactttctttattctacatagatgtaagcccatcatgcccttcctgctggtccctggctttgtttcccaggacttcctgctctccagggcctcccccactctctgactactccataaacaaaaggagatgccagggctgcttcattctgggcactcccagtgggagccaagcctcatcccaggctcatccccaccaccgtgctgacaactgaccccgccttcgctgccccccgcccaggccttgctccccgctaaacgcgctgtgtccaaacagaatttctcatctccaccacctcctgcagcccctctccctgatggcaccccatccacacaacctctggcaggaagcctggggtcatcctgactcctctcctccacctgtgccctcccctacctacctgggcaggcccttatctcctgtgtggggacacctgggctccctgtctctcagcccctgcactccggcgtatacactgcggcagccagagagaggttctgacagcacagacccacccttgtgcccggctcagggccttgctctcgctgtgccctcagccctgcaccggggcagcttgtgctcatccctgaaggcagctccggcagcacctgcacgccccatccacacctcaccaagatccctggtcccctgccaggcacgcccgacccctatggcgtgggtgctggcgggaaagagaagctgcccagatgtagggcaggcagatcagtgtctccctgcctgagtgggtggaaagacttgggcaccctctggtggccataggatggctcagcatccacagcagagcaggctcagggacagtcccccacctggccccagaactgctcccggcccacaggcctgtacacacctttgagggtcttccgcaggtgcgagaggaggccccccaggcgctgcaggtcaaagtagtccaccttgccattatagaagacctggggcgggatgtaggcctctgcgaggaattgaggaggctaggccagtggtcacggcccagtaggaagaccctccccacagccctcccctccaatctggcctagcacagcctgggaattctggctttggccactcacccatccaggcagacagagaaactgtctcctggaccaagaaacagacctcccctacctcttctccacccctgccatttcaggtcagagccagcagctgcataacttggggtgatgggggtactcatggcagccgttcactcaggagaagcagagaggcccagccccagtcctgtgggatatcccccaatccagggcaggtaaggctcccactgacccttggggactcaaacacagggccccccagcacccacccaaggcagccctataaaggacgcacagagaaatgggggggcaaggacggaagaaaagagcccacaatggtaggagcccgtgggacaatcagagcaaacacaggatcggcaggcctgcggtgcagggctcctgctgccccagtggagaagccgcctgtggctgggtaggactcaaccaggcaggatgccggggacaactccccacagcccacagcctcagctcagcactctgcactaacattaggggctgccctacgcctggctctgtccagcctcactgacctgggaccccggtgccactcaccctcactgaaggaagcatgaggattggaagccttgtattcatcccaatagtagcgcagggcagagatcagccggtgtaagaagcagaccatgtactcaggggggcagagcatgggcatgttctgtggacaccaggcatgaaacatgcattggtgccagtccagtgccttgcccattcctcatccaaggccctgcctgagggtcgagggttaagcagggagggaaaagcagcagagaaaagcttggggctaggcagggatgaggcagtccgagaagtgccaggtgctgagggcatggcatgtgtagtgcagccggggatccacagtgggctggcctggaggacacctaccccccggccactggcgttctcctgcagaaacttgcgaaacttggtcaggaagatatacctagaagcttcaccctttgagagagggaaaagtgaggctgtgctgagctgagaatgcaggcccagactgggctggctcagtgctgcaccttcccccagcccctgccatgggaaccaaacccagttcccaccctctgggtcttaaggcccagtgcagcatccctccccacagggccccacccagggctcctgggagtcactcaccccattgtcatctttattgtccagcagcagcttcaggatctggacctgtagttcttccaccactggaggtcaggtgaggaacatggccctcaggctccaggagatggggggcaggtttgggccagggctccaccaccagggttccccaagtcccacctagacatgggcacctccaagcaccctcatgtgcacacacacacctcccaccctaccccgtgcccaaggcgggctgaccttcgatgcgcttcctgagccgctgacagccccgttcgtaggctcgccgccgcagccgctcctctgcggtctcctccttcatctccgtgctctctttgccctaggcaggggtagcaggtggaatacagcagggtcacctgggacctagccaggcctccttcactcagaacacccacactccatctccagggcttcagggaccagggccagtgaaaaggcctcatgctagatgcccagtggccagatgcccaggccaggggccttgccatgacctctgcccatcccacttggggtgcactcacctccctactggagcagtggggccaccaggtggtgggaatgagctcctgcaggccggcctcctccacacgcagggggctcttgatgtaaaagaagacgacggagcggagcacgtcgaagctggcgggtgtcaaggcagggctctgcttgccaaagggcactctgcacaccctcaagagtccttccccaggagcccatccctggatgtgcctaccacagctctcccaccaccacaggggcatgttgctgctatgtgtctgacccccagggcatgctccctgacaaaaagctgtggtggttaagcccaccagctccagtacccagcaggtgcacgataagggcttgtcacaggaacagatgactgtgggacaagctggagagagggactggtggccttttctcaggccccaactctgacctctgtgtctcccagctttgtgtctgcctcctggaggctggaagaccccagaccaagaaaacggctacaagctgaggcttcccagccaggggctcaaagctatgctctcactcactcatgcagttcccaacaattctgggaagcaggaagagctgcctccttaaagatcttgcaggaatccccactgtggaacatgaacaaaagtgctgggctgtggccgaagagggcaggccctgtggcccctcccacacctctgcgtagcccgagtctgcagtcattcagaaccccctggctaggctggctggccaggctcagtcctttgctctctcgtccttgctctgtagagaaaatgccacgttgggcagctctggtcctcctgatgctcccaggggacccctggcctgatgacactccccttcctggcctctgctgagtccagagggcaccccatgtctggcctgccaggcagcaaggaaaggatacaggacattgctaagcagaaacttgcgggacttctcatgcctcaggatggcgatagtgagccgcaggtaatggatctgtggagagggggcgttcagagtggacaggcgagtcccagggggctcagggcaggggtaggggctcccacctgtaggcccaggtctgggacaatgggtgagaatcggtacagccgaagcagagacatcatcaact

SEQ ID NO: 1495 - DNA, 6254 bp, Homo sapiens
  SITE (2676): n equals a,t,g, or c
gaagcccctcaaagccgcctgtgtggtccaggaccacagtggatgggccaagccgcccttcaacctgtcctgaaaagaggagaggtggggtcaggcagggtggagcatttgacaggatgcatagggtgtcctgagctcaccagacgtctccaggcccgctacgtcccagctctgcacctcccaaccccactccagaggtggccacataccctggctttcctcctcctcattgtccacctgtagcaactggtccaaatgttctggcaggttctggaagttcaggggtttcctggggagagtgagaggctgccaggggtccacaagtccttgaaatcagccagatgacactaaatcccatcctttcccctgagctcacaggggggctgcctagactccagaaaaagggctgtgcctagtcctagactctggcatgcaggaggtcagaaggccgaattctccactaaactcaaaagtataaccagtccaggccgggtgtggtggcccatgcctgtaatcccagcactttgggaggccgaggcgggcagatcacctgaggtcaggagttcgagaccagcctggccacatggtgaaaccccatccctactaaaaatacaaaaattagctgagtgtggtggcgcatgcgtataatcccagctactcgggagacagaggcaggagaatagcttgaaccttggtggggcagaggttgtagtaagccaagatcgtgtcattgtacttcagcccgggcaacaagagtaagactctgtctcaaaaaaaaaaaaaaaaaaagtatgtggccaggtgcggtggctcatgcctgtaatcccagcactttgggaggctgaggcgggcagatcacgaggtcagtagttcaagaccagcctggccaacatggtgaaattgcgactctactaaaaatgctgggcgcggtggcatgtgcctgtaataccagctacttgggaggcggaggcaggagaattgcttgaacctgggaggcggaggttgcagtgagccatgatcgtgccactgcactctagtctgggtgacagagcaagactctgtctcaaaaaaaaaaaaaaaaagtagccctctctaagtcttaattccttcatctgtaaaaacagaatagtgacttatgttagagatgctgtgaagagcccagggaataacaagtgctgtctgcatagcacataacctgtccgctctcaaaggtggctgtgctgatgatgtctggaagaagaaggctgggagaaatgctggttcccaaagtggtcagtaccaaggccacctagtccaacccttgcccctaggcctgtggttcctttggggcagattccagtctcgccaccacccagccaggggagtctgtgttgaatgggacatgttctggaagtatgaaaggctcagccctctgagctgctggatggctctgtcctgtacccgccagtccataaatggtcagcggagcacatgacccacctacccgagccaaaggagttgggaaaaatctgtctgggtggccccctcatcctctcaacacacaggcctagagggaaaagggtactgtctaatgccagtcagtgctgtcctgagctcagctgctaagaatagcagggagtgaggtggtggtaaccagcaggactcaggcagaacagaggcccattacacacctggctgcccacagggtgccaccacctgctcttccacctttaatgccagttcttaccccactcatccacacagacagaaagctctggaaggggacaaaggttggacaagcaccctgacaaagtagccactacccaggctcagggatcacatattccccagtgtaagccactcccagccctgagctgtaggagcagagatgcacaaaggcccctccccactgctgctctgtcccaggccaaggccaggtggtggctatgcagtcggggtgctcagctagtagcatagaaggctaaagccaaccccatctctgaataccccagtgggcccaaggataaaggagccttcctcaaaagcagttacaggccaagcatggtggctcacacctgtagtctcagcactttgggaggctgaggtgggagaatcacttgagcccaggggtttgagaccagcctgggtgacacagtaagaccctgtctcttaaaaaaaaaaaattagctgggtgctgtggcatgtgcttgtggtcccagctatgtgggaggctgaggtgggaggattccttgagcctgggactttgaggttgcagtgagctatgactgtgacatagcgagaccctgtctcaaaagaaaacagttcttaacaagcccacacttggagcagctactcttgtacctgaccccaaaagtcgtgtgcctgatcctgagagcagactgcacatatctgtgggcagtcggcctgagacagccaccactgagtgcctacagcactgcccatttggccaagaccagcaacttccctgacctttttggatctcctaggtcccagttcagggccctgaatacccacaaccactgactgacagccctaccacctgctgtctctcctggcggccacagcagcagcagcagcagtaggaccatctctggtatcacatgaggtagggatcagatggctctgagaacaggccaggactgagtatgggtgggggggtgggcaggaactctctgncagcaggcactttctgaccaccacagttgcttaaatagaaacagggtaccgttgctgccttttggacctgcctaaagggcagaagtcgtaaagacagaacagctaaggctgatgaagggggttgagaagacaaggacacccggtgcctcactgcagggaggggagaacctacttgatcctttgaagaagtaatctggcaacagtcttaaaagtgactgcagttcaaacactctagccacacgactccagccctgggcatcctcacagcattgtttacaaaagcaaaagtccttccaaactagggcactggtatgggccacagcagaccccctggccctaaagatgctcagtaagataaattgataatggggaaaaatactcacgggataacatttgatgataaaaataggatgcaaacttctatagacttttggaagtgagggacatgtccattaccttgatggtagtgatggtttcacgggttttatatatatgttaacacttatcaaattgtacactttaagtatgtgtagtttattgtatattaatcatagctcaataaaaacgttttaagaaaagaactgaaggtgataaattttttaaagttttctatacagcataatctgaactacatacattataagataaacagacatgaagttaaaaagcttctgcatagcaaagtaaacgatcaacaaagtgaagagacagcccacaaatgggagaaaatatttgtaaactacccatctgacaagggattaataaccagaatatacaaagaacgcaaacaactctataggaaaaaaactaataattccatcaaaagatgggcaaaagatacgaacagacatttctcaaaagaagacatacgaatggtaaacaggcatatggaaaggcattcaacgtcactggtcatcagagaaatgcaaatcaaaactacgagatatcatctcacaccagctaaaatggcttttatccaaaagacaggcaataacaaatgctggcgaggttgtggaacccctgtatgctgttagtgggaatgtaaattataatagtgcaatcactatcgagaacagtttggaggttcctcaaaaaactaaaaattggtcaggtgcggtggctcatgcctgtaatctcagcactttgggacgtcgaggtgggaggatcacctgaggctaggagttcgagaccagcctggccaacatggcgaaaccccatctctactaaaaataccaaaattaactgggtgtggtggtttgtgcctgtaatcccagctactcgggaggctgaggcaggagaattactagaacttgggaggcagaggttgcagtgagccaagatcatgccactgcactccaggctgggcaacaagagcaaaactccatctcaaaaaaaaaaaaaaaaaaaaaaaaaaggccaggcacactggctcacgcctgtaatcccagcactttgggaggccgaggagggcggatcacgagctcaggagatcaagaccatcctggctaacatggtgaaaccccgtctctactaaaaatgcaaaaaattagctgggcatggtggcgggcacctgcagtcccagctacttgggaggctgaggcagaagaatggcatgaacctgggaggcggagcttgcagtgagctgagattgtgcccctgcactccagcctgggcaacagagcaagactccgtctcaaaaaaaaaaatttttcaaaaaaaaaaaaactaaactaaaaattgagctaccatatgatccagcaaccccactgctgggtatatacctgaaagaagggaaatcagtatatcaaagagatatctgcattcccatgtttgttgcagcactgttcacaatagccaagatttggaagcaatctaagtgtccatcaacagatgaataaataaagaaaacatggtacatatacacaacggagtactattcggccataaaaaagaatgagatcctgtaatatgcaacaacatggatggaactggaggtcattatgttaaatgaaataagccaggcagaaaaagacaaacattgcatgttatcacttatttgtgacagctaaaaattaaaacaattgaactcatagaggcaaagtactggatggttaccagaggcttggaagggtagtatagggcttgtggggagatggggatggctaatgcgtacaaaaaaattgaattaatgagacctatctggtagcagaacagagtgactatagtaaataataattgtacatttaaaaataactaaaagagtataactagattgtttataagacaaaagataaatgcttgaggggatggataccccatttaccatgatgtgattattacgcattgcatgcctgtatcaaagtatctcatgtaccctataaatatatatacctactacatacccacaaaaattaaaaattaaaaatgtaacacaaagaaagaaacagaaaagaatcacatttgaatagtcatgttaaaataacaagatagcaggtgcttttccttctttttttagagacagggtcttgctctgtcacccaggctacagtgcagtggcatgcagaggccaactcactgcagcctcaacctcctaggctcaagtgatcctcccacatcagcctccctaacagctgggactacaggtgcacaccaccatgcccaggtaatttctgtattttattgtagagatggggtcttgccatgttgctcaggctggtcttgaactcctggactcaagcaatctacccaccttggcctcccaaagtgctgggattacaggtgtgaaccactgtgcctggccctctaagtttctgctaaaatgtacttgtaacttttatactgactacacttaaaagtattaaacttgtaaagaaaaggccctggaggagtttgttctttacaaggtcagtcagaagctacaaggggccaggctggggccaaggtgagggcaggtacatgcaggggcagatgctgggtatggagtaggtgccaggtgctagctgggcatgaatgtgcacccgctccctgacctctgctccctgactctcagaaggaactagcactgcctggagacaggaagaagcagagtacggaaggcagactctctggccagagatctcgcagccaggagcacagtgagaacagagcctaagcctatctgtccagagcccaggctccctttccctacaactgcagcctccttattctggtctggcccagcagagtgaggaggggccacccacccagccatacctgctggtggctgctgggggtgcatgttcagaagaggaaaagatgcggttcaggtagtcattcagcagcttctcctgcacaatgcctgagccacaagtcagaagggagaaaagggccacatgatcagtgcagctcctggcccctgctggccccagagacttctggtcctaggccagccacaggtgaagcagggcttcaagcctttgtccctccatcttcttcccacaagaggagcctcttccttccctgcaagctcttacctgtgaccctggatttctcagcatctgaggtcagcctatagctcttgcgggagaaagacatgccgg

SEQ ID NO: 1496 - DNA, 1042 bp, Homo sapiens
gtcttctgggtgacacacagttcatgtattaagatacttgtttaactttctcaggaatgtttctcttaggtaagtggtaattaaactcttggcaaataatagttgaatttttcaactaacgttttatgcttgtagatatgtacaatttcatttggaatggaaatttttctttaaaaattccatatttcattactatgaggagtatactctaatttaagaaacagcataccaaatgatttaatatttccttatcttaaagtcatcatcatgaatgccttaatggttcatcattggtgtttataagattcattgtccactgaaagcctttgtttactgggtttttaaaatatttctgttttgcttttcaaaatttccctctccctgctgtcagtgagcctgcttattctagacatacttgctgccttctgatacttccaactttttatgtgtaggtctgaaaatcagataaagatgttcaatttgtgtggaaaagcaaagtatgaactctaagattagcatggtttttagaatacatatttaaatatagagaggctatatatttctggttctttcttgtgttcaagccaatcatgtagatgaagggtaactattttgacttgtgtatgactgataataaagtcttcaaaatgtactacatacgttattttaactcttctgtattttcacgtttggctccatctaataaagcgtttattcacttaagatccagtgagaataagatggatagcagcaatcttgcagtaatatttgcaccaaatcttcttcagacaagtgaaggacatgaaaagatgtcttctaacgcagaaaagaaggtacgattacaggctgcagtagtacagactcttatcgattatgcatcagatattggtaagatgtagttgcattattaacagaatttgtttaaatgaggaaaatctctgtttctttcaaaggaactatgaaggcaactgttagaaagttggtatattactgacctcacccccaccctacagtaccggcccctcctgcaaagaaaaaaaga

SEQ ID NO: 1497 - DNA, 8821 bp, Homo sapiens
ccctccacaacggaggattcataagagcaggggccctgtttgttttgttcatgctatatccccagacctggcaccaattaggtgcacaatacatatttgttgaatgaatgaatgagaatggtagtcttttggttcccaggtttattgacaattactcatctatttttgactccccgagtcccagctcccaaactcgctctccctactccaggcttcacggtagtcccagaatgtaggaagtgggacaggatagactttaacatcacccaggcctctggtttccaaagcattttttttctttaatgcagtaaaaccattcctttaaaacccaaaatctctcatggaacccctacgtatcaaatatataaagcaggagctgcccttgttcagggataatatgtggggcttatggctctaagaaacacagtttgacattcactgctctccttacttcagttacctcatggtatagataaatgggctgggcccagagaggggccatgacctgtcctgggacacgcagccactgaagcctttagtccagtgctccttccacagcaccacactggattctggagtctttccagccagggcagaggaagctgcaacagtgccacgataagagtttctgggtcttctggtacctaccctctcagactgctggtcctagggtcatgtgaggggctggctggagggtggactggaagtgcatgggggttgggtggggaagccaggtgtctgtgttggaaggccagtggggctgggggattgggggctggatggctgggaaggacttcccaggcctgcagtggtctctcctttcctcaggatgaggctgctgagctcctggagcagctgttcctctagggacccccgtgcctggggactgctctttgaaggggggcctggagggggctcaggtggcctctcctcctggccaagggtgcttgacttggagagaaagggttgatccaatgacttctggctggtgagggggttctctggcttcactgtccactcccgtgtggtggagaaggaggtagaagtgtcctggatcaactcagggaaggcccctacttcctcatacactggctcctcgtacacaggctcctccagctcctcttgctcctccacagacccctgggatgacttcattggctggatgggaatggaatggcaggagtgggcacatagttaaagttaccagattatgaatcactaacatttactgagctcttcctctgggccagatgctgtaaaatacttggcatgtatgattctggaacaaccctgtgcagtgggttacactgagtcaactgaatgcaaaggggttaagtaagttgcccagcatcacataatgagtgaatggtagagctggggtttgaacccaggtctgtctaactccaaaatgcattcacttcatcactttccttctatttcacagattctgtgacaactttttcctttttttttttttttgagacagagttttactcttgttgcctaggctggagtgcagtggtgcgatcttggctcactgcaacctccgcctcccaggttcaagtgattctcctgcctcagcctcccaagtagctgggatcacaggcatgcaccaccacacctagctaattttgtatttttagtagagacgggatttcaccatgtcgattagactggtcttgaactcctgacctcaggggatccacccacctcagcctcccaaagtgctgggattacaggcatgagccactgtgcccgacctttctccttttattactgcatcttacatccctcattttcctcattctttctggcctcctctctctctctgtcctgtccctctccctctcccttttcctcgctctccctctctctctctcacacacacacacaccctgatggcctacacacacacacacacacacacacacacaccctgatggcctacacacacacacacacacacacacacacacacaccccctgatggcctacatgaggaaaacagcacacccggggctcaggcagcacagaggaatacagggttgacaggcacaccgctggagcaggcacaatactcacaaagaacatggacagggtcctccggttgtgtagtcgccgctggacacaggtggggtggggacaaggggaaggaaagacataaagacacagtgaggactagcaacaggagacaggggtggggaatgggggtgaagaaggcagaagggagggggacagtgagcatagggtggcaccaggctagcaggcacaccactgcctactgcaatgtgacaagggctacacgacaggaatcgggttggggcagggtggggtgccttaccagggtctgattggcagagaggagggtggctccactgtcatccccacggataggcagcaaaggcatagtgccaaacttctgacgggcaaggtcagaggaggaatggcgtcgtaagaccactggctgctggtcatcgtgctggtgggagcgtgaggggttggcatcagtgggcatgaaaggcactgaggaggacagctgggccccagggggaccacagacccagccctcagccttttctttcccctcacctgggctttaaggatgctggtggtccaatcccacatttcatcctcgtcagtgcaggacaagtagctggggtgatcagaatggaatcagagggagagagagggtcacagctataggaatggagcatacaaagagggaagagaaaagacagggtgcagaggtgggccagaggagaagccagggcaggaggtactcacaggtgcatcttctctagtatcaatgtgaagccccacctgggagacaaagaacagtgatggggcagtcagaaagggcaggggggtgaaggcaggaaggccctggaagtgcgggctggggaagaaaactcacggtgttgggggctttaacttcttgcggattcccaggtagaccttggcaccttccaaaggccactcccgttctggtttagagctctgagaacagaaacagagtcagcgagatggagagatgagagatcatggttaatgaggtcaagacgtcatggaagcaatggggtctgtggtcacagggtcacagaagtcgggggcagggaagcaatgagattgatgagagtatgggctgtggagtcagagggtgggtgcagtcatggctcctctccatggccacccagcatcccacacctctggccccagggcctcactttcttctccttgagcagcagcaggcagcggccacgcagcagaaagaacctctcctggaagcggcttcccagcaagcgaggtggctcctcacgacaccgcaacagccccacccgtgggctctcacgtcggatacctgggcatagatgggcaatcctgggtggaggatgctaggggagagacctgggggatgctgggcagaggaaggaggctcacctgtgaagaggcagccagcttgggccagggggacttttttcaagagcagggaagctgagcagggctctgggagctggcaccattgtaaagcctgctctaagaccttttccttgggatgcagtggccgctcttaaggggaaaggtgagggtttatatatcaatcagaatatccatactaagcccccagctctcaccagtcattcattcatccattcaactatccaaccacagacatttatttttcactgtctctatgccaggaactgtgctggccctgggatacggtggtgagcatgatacacatggcctcccttcacaaagcacacagtctagtgagggtacagacaaaaaaataattgcagacaaataattgctttgcaagaaacaataaactgagcaagcaacaggacagcaactgagatagggtagtcaggcaagacctttcaaaagtggcacttgaagatgagactcagagatctgaaggattaggaagagcaagccatgctaagattgggtggtagaagatttcaagcatgacaaaatgcaagaacaaaggctggcaatcaggaaagatgtatttggggaactaaacagccaatgtagctacagcaaagaggatagatacgagaacaggtgatgtgagatgaggcatggaggacgcaggggtcagacattcaaggccatgtgggccatggtaagggactggaatgatactttaagttcaatgggaagccactgaagggttttaaccataggaaggatatgagctgatttatgcttgaaatattcacttggctgctgcatggaaaatggattgtagggaggcaagcatggaacattgtccagctatcccctttctggggccacacattttagtggttactgttgacagacaaaaacataatgatgacttcaactaggatggtggtagcagtggagatggagagaagtgattgattctaatggaatcgacaagactagttggtgagttgtgtatgaagatgacacaaagggaggagtcccagaggactcccaggtttctggccttaatcactgggtgaattgtggtaccatttactgagttgggaaaaattggagaatggcctaggctttttttttgaggaaaggggactagacatcatctaaattggtcttagatgttttacatttgagttgcttgtcagaagtggaggtgttgagtaggcatttggatatgtgagtctggagctgagaggagagatgtgggccagatatacaaatttgggtgtcaggttattaatggcatttaaaaccatgagaatgggttaattcatccaaggagaaatgtagatagatgagagaaaagggcctaggattgagccgtgggtctctccaacatttggagtctgggcaaaagaggaagagaagctccctttaaggtagaaggtaaactacgagcttgtgggggtcactaaggccaagatggaagaatactgagaaagagggagtgagtcaactgtgttgaatgtcccctcgcatggatgagtggatgagtcatccatgagttaccattcatatttggtaacatgaagtcactgatgaccttgaccacacaaccacacacacgcatatacacatgcatgaacacacaggcgtggtcatactcacccagctccccatgctcgcgaatctcaaaagtcacccacaagtccatcccagctgctgtcccccgcatctccagtacctggttagtcagctcctcagcagtcagggttggggacacctggggtcagggcaagagcagagaattcatgctggtcaggctattgcccctggaacctcactatcctcttatttcccctccagtcccctcaggaccaaccttcagggtgacacagttgtctgggagctgctgctctatataaacttccatgatgaggtctccagcctgagacagctgaggggaggggtaaaaaagtcagaagggcaaaaaaagggtgcaaaagacatcaaagtcagagggttcctcgtgttgcctcataagtgactcttccaacaaaggtctcctcccaaccccaatgtcactcaggctcttaaaagggagacctctgggagtggcagaactgcatctttaggctgcacatgtacttcccaaggcatcatagtggttgggaggacagatgtggagtcagactgcctggtctctctgccactcgctacagggtgaccttgaataaatgacccgctgaacccgtttatttgaaaaaaatgagattacctacttcatggagttgtatcatactaacatgagattagagatgcttggaatatagtaagtcctcagctatgtttgctattatatttattattattattctcactgctttgtctgactttactaactcgtccttggatctcttacacttagtagtatggtctcacttgatgttcccacagaaaaccaaaaccaactatccagtgccaagattatcaccaggaagaatcctcatggtggaacaaatggagcaaaccctaaccaaaccccactccccaaagcacttctctcattgggttccccctgtctcccaaagagctgagtgctagtgtccagaaggacaggctggaaacttcctcaactgggcagaaagtcagcttcctgtcctgatgtctcctcctgccccattcaggagactaaggtcaggacgagttacctgcacgtccttccaggtggtgataagactgacctccaagtcaatctgagctacctggtcagaatcgatctgtgaaagagccaaaagagagtgttggggtgctggaagaggatctgccgggaagatctcaaggccaaggaggacctgtttaagagggctggaggccagaagagctaagaaccaagggggtgaggatgttggaagtgaagttgtgggagaagaagggccagggctctgggaggtagttcctggtatagctggccaccagaggcctgggctgggggcttgttggggtgatcaggatccagagtctctgggtcctgcaagggtaggggaaaggggttgtgggttaggggtcaggaaagccttacatcaaagacagagatgtagccatcaatgagctcttgcagcactcgcacctcgtgctcccctcgcccatccgtctggaacacgctgggtgcaaacagcagagccaagttccgcgtgcacatctggtttagagccgcacatttctgcaccctgcagaggggtgccacggtcttcatcagtgtagccactcattcagcaaacacttattgagtccctattgtatgcctgggctaagtgcttggaatacagcagtaagataatattggcctcaaggagctcccagtctaggggagacagataaggcaagaatcagcaaactttttatgtaaagggacagatagtagacattttaggcttgcaggacagacagtctctgttctaactctcagctctgttgctgcatcatgaaaggagctatagaaaatatatacatgggccgggcgcggtggctcacgcttgtaatcccagcactttgggaggccgaggcaggcggatcacgaggtcaggagatcgagaccatcctggctaacacggtgaaaccccgtctctactaaaaatacaaaaaaaattagccgggcgtgatggtgggtgcctgtagtcccagctactcgggaggctgaggcaggagaatggcgtgaaccctggaggcggagcttgcagtgagccgagattgcgccactgcactcccgcctgggccacagagcaagactccgtctcaaaaaaaaaaaaaaagaaaatatatacatgaatgggtgtggctttacactttatgtacaaaactttatttacaaacataggcaacaagctggatttggcccatgggcctgtagttgaccaatccctataatatagtatatttttattatttatttatttttatcttttatagagatgggatgtctcactatgttacccaggctggtctccaactcctgggctcaaatgatcctcctgccttggcctcccaacatgttgggattacaggtgtgagccaccatacctggcccctgtaatatagtataatcagtgcaatacagaaatggcttctccccagaattgctcaaaggcctgtctccctaacagattggtaaaggtagatgtgcatcttattcatttttgtgtttcttatatctaaccctttccctgacatcgcataataaaacaaaataatattgattgctaaccatttctgaaggcttatgacatgccggatgtactggcatgtactatagttaagaattttatgaattttaactctttttgttctttttttttccttttttcttttttcttttttttttttttgagacaagatctccctctgtcacccaggctggagtgaagtggtacaatcttggctcactgcaacctccacctcctgtgctcaagcgattctcgtgcctcagcctcctgagtagctgagattactggtatgtaccaccatgccaggctaatttttgtatttttagtagaggctgggtttcaccatgttggccaggctagtctcaaactcctggccttagatgacccgcccaccttgcttcccaaagtgttgggattacaggtgtgagacaccacgcgcccagccttcatttaactctctcataaactatgaggtggatatgattcattacatcatccattacttccttttagaaatgaagaaattgaggcccagagagaacaagtaacttacccaaagtcacacagctagaatgacggcaccagattaaagcctaggtctgcctgatccctcaaatccattctctgaaccttagtgctatgataccttcacttaacaactgtttgtggaatgaacaaatgaatgaatgaatgaataaatgaatgaaagtgcagggtcagattgaagtgaggaagggttctgcagagggtctagccatactgaccgatagagatgcccaatgagggtggccagtgtgcggcggttgacccgcggcaggcagccaatcacatctttatatttctccaggcgctgattcttctggggcagctctggggatggaatggaggagggttggggaggacccgggaagaaagagtggcagctggtacagagggagggatttttaggcacaaatgcaggatggatgtgtctctgcccccttcccacctccccctgagccaagtctctggatgatcccccagggtgggaagtgatggggcggagggctgccaaaccatggattctggtgggggaaggcagagatcctggttgggccttggctctcagggatcttaggaataccagcagcctccctccagcgaggcagcaaccgtgcagaggtcacagggtcatcgagctc

SEQ ID NO: 1498 - DNA, 13467 bp, Homo sapiens; identical to SEQ ID NO: 1330

SEQ ID NO: 1499 - DNA, 389 bp, Homo sapiens
ccctggactatgtgttatggtccatgacaggataagcacagaacttgagagtaagcatttagaatattttatagcaatttgacatagtaattttatgtgttgaatctaattataaaaaaagggcttgggccaggggtggtggctcacacttgcaattcccagcacttagggaggctgaggcgggaggattgcttgagcccaggagtttgagagcaacctgggaccctgtctctacaaaaaataagaattagccaggcatgatggtgctcacctatagtcccagctactggggaggctgaggtggaaggattgcttgagcctcggaggtttgagcctacagtgagctgtgatcatgccactgcactccagcctaagtgaggccctgtctc

SEQ ID NO: 1500 - DNA, 12121 bp, Homo sapiens; identical to SEQ ID NO: 1327

SEQ ID NO: 1501 - DNA, 5968 bp, Homo sapiens
cggtgctgggccgcgtggccctggcgctggaggagctggacgccccacgcgcgcctgccgccggtctggagcgctggttcccgctgctcggggcgccggcgggcgcagcgctgcgggcgcggattcgggcgcgtcgcctgcgcgtgctgccgtccgagcgctacaaggagctggcggagttcctcaccttccactatgcgcgcctctgcggggccctggagcccgcgctgcctgcgcaggccaaggaggagctggcggcagccatggtgcgcgtgctgcgggccaccggccgggcgcaggtgcggcaccgcgacagcgcggaccggggctaccaggggtagaccgataacgcgcttcgggcaggagttggggcgcaggacctgagttgcacctgtaatgggggagacaccttgaaggggtgtgaggggcgtggtccaagtgtcacctgtaagcggcggggcacctagaagggcggggcacctagaagggcggggcctgaacatcacccgtaaggggcggggcaccttgaagggcgggacctgagcgtcagctgtgaggggctggggctgagctgcacctgtaaggggcggggcaccttgaaggactgggcctgagcttcagctgtgaggggcggggcctaattatcacccataaggggcgggacaccttgaagagcggagcctaagcttcagctgcgacaggggcctgagcatcacgcgtgaggggcggggcccaggttgcacctcagcgctgaaaggcttaaatttctgctgtgagggttagaggttccggcctcggttatgagccccagcagtaaggactgggcctaagcatcagctacaaggggcggggcctgtgcctctggtgtgagggaccagccaaggatccgaattcccttggactctgtctgcatctggtgcaacctgacctcctgcccttcctaggcgctggtgactgacctgggcactgcggagctggcgcgctgtggaggccgtgaggcgctgctgttccgggaaaacacattggccaccaaggctatcgatgagtacatgaagcctcgtggcacaggattacctccaggagaccctgggtgagctgggggagagtccatgtcagcggcctgctggtgagctaggggacctgggtgaagttctaagagtccttgagcaacctggattctggtagtgagtggtgttttgggggtgctaggatcctggggacaattgggagctccccaagatgttgggtgcctccggaataacctgaagacaaggttggaggatgggtgtggcaggttttggtggtcatggccccagcccctatctggctgtgctgggctgcaggacaggttgtgcggcgtctctgtgcttctactgaggactgtgaagtggaccccagcaaatgtccagcctcggagctgccagagcaccaggccagacttcggaacagctgcgaggaggtcttcgaaaccattatccattcctacgagtgagaatcagggccccagcagcttagcccacccctgcttaccatgctagccccgacctccagtttagggtggccagataaaatacaggagacactcagttaaatttgatgcaataattgggaccatgcttatactaaaaaattactcatttgaaccaggcatggtgactcacgcccgtaatcccaatgctttaggaggccgagacaagaggattgcttgagcccaggagttcaaggccagtctgggcaacatagcaagactccatctctccaaaaagctttttaaaaatgagctaggcatggtggcacacacctgtattcccagccgaggctggaggatcgcttgagcgcaggattcaaggctgcagtgagctatgatcatgccacagcaccccagcctggttgacagagaccctgtcccaaataaaagtaaaaatataaataaaaatcactccgttatctgaaattcatgtttaactggatgtcctgaagtttcgtttgctgcatctggcaaccctatcaccatgcaaccctatcaccactgaccccaagtaacctgagacccaattccttgtcctgtaaccacagttgattccatatccccaatttcatgccactggctccagttaacataggacctcaatcctatgaccagatgatgccccaagtccatgatccctggctttaagtgaccctccacctcaaatcccatgcaactgatcacaggagacctgggattccaatcccttgacctctgaccctaggttaacctgcatacctaatccctgacttcaatcaagtgacttctgaccctaggtgacctccagagccccaatcctactttatatcttgtactctggcccaccagtctcatgtctaattataagtacatccaagctcataacctctgtcttcatgtgaccctgtatccccaactataagagtattatccccagcgattgccatagctacaccataagccatggccccatgctgattcataaccccaagcattgttatctcagatattcccaatcctagagcccagaccccaggttcagtgagaaggaagcctgcatgggcttcatgaatagctctctggaggatcatggaccaatcatgcagtgcttctgggactcccaaccttatgactttaacctttatgcccatagcctccccgtctgaccattcattgcctcttctgcaccagctggttccctgcggagctgggcatcgtgttctcaagctggcgagaagcatgtaaagaacgtggctctgaggtgctgggcccccgactggtgtgcgcctccctcttcctgcggctcctgtgccctgccatcctggcacccagcctctttggtttggcaccagaccatccagcacccggcccagcccgcaccctcacactgattgccaaggtcatccagaacctcgccaaccgtgccccgtaggtgctgggaagctaggggtggggggaccatgctgggagtgtgggggtggcaggtgcctgacctgacccacccagcctggccctgatccaggttcggtgagaaggaggcctacatgggcttcatgaatagcttcctggaggaacatggaccagccatgcaatgcttcctggaccaggtagccatggtggatgtggatgctgcccccagtggttaccagggcagtggtgatctggccctccagttagctgtcctgcatgcccagctctgtacaatttttgctgagcttgaccaggtatggcctgaacccagagtagggaggcaagaaggcttgggagactctgaccctggagactttgctcagtctctgtcctgcatgcctcaccagacaacccgagacaccctggaaccactgcccaccatcctgcgagccattgaggagggccagcctgtgcttgtgtcagtgccaatgcgtctcccactgcccccggcccaggtccactccaggtaacctcaagtctggtctggggtctgatgggtgggaacaggaaggagcagggctcagacaggggtcagaggtgaagttggatcattgtgagcagaggtcaagcccagggtcagacgggaatcacaggttatagaaagggttgggtcaaaggtcacagtgtgtttgaggtcggggatgagaggagaggttagggtggagagatgtcaagggtcatagagaggacagtattatagtcagaagtcaaggacaggagccaggctcagtggctcatgcctgtaatcccagcactttgggaggctgaggcaggaggatcacttgaggccaggaacttaagacaagcctgggcaacatagggagaccccatctctaccaaaaaaaaaaaaaattacctgggtatagtggcatgtgctggtagtcctagatatttgggaggctgaggctggggaatagcttgagctccagaattcaaggctgcagtgagctatgatctagccactgcactccagcctgggcgacagagcaagaccttgtctcaaaaaaaaaaaagaaaggacaagttcacgtggggggtgaggtcacttctggtcaggtcgggatggggtcgtctcaggggccagtggagggtctaagatcctccatcccacccctagcctctccgcaggggagaagcccggcttcctggccccccgggacctccccaagcacacccctctcatctccaagagccagtctctgcgcagcgttcgccgctcagagagttgggcccggccacggccggacgaagagcggcccctgcggcggccccggccggtgcagcgcacgcagagtgtcccggtccggcgtcctgcccgccgccgccaatctgcggggccctggccgcgacccaaaggctccctgagcatgggaccagcgccccgcgcccggccttggacccgggactccgcctcgctgcctcggaagccgtcggtaccctggcagcgccaaatggaccagccgcaagaccgaaaccaggcactgggcacgcaccgacctgtgaacaaggtaaggtcaggcccaggtccgcgcctggggagtgggaacagggacgcgactggggaagactgaagggccaggcaagtctgggttcaagtacccagctcgctgtgctgtgtgaccccaggcctagcccgaccctctctgagcttcagtctccccagctgtaccgcaggagggatgttccccaactaggcaggccggtgatgacgctgagcgcttgggcctgggaggtcagggtctccggggagacacaggggcgggacaacgggtcagattacagctgctctcccaccacagttggcagagctgcagtgcgaggtggccgctctgcgtgaggagcagaaagtgctgtcccgcctcgtggagtcgctgagcacccaaatccgggccttgacggagcagcaggagcagctgcggggccagctgcaggatctggactccaggctccgtgctgggtgagcccagccctctccattagctccgcccccaggtgggcccgatccaattagatctgaccaggccctcccccccccccccaaaccacgcctagcacggccaagccccaccctggccccgccccaataagtctgtccaggccctgcctcttggcaagccccgcccccaggtggacccacccaacgaaggtcggcctaggaccctggcagattctctcatccaggccccacccctccatcagcccctcccaacctggctgggccgggcactgagatatctcagcctgggcactccctccagctcagtcacgaccccacccaggactggccaaaccccacctccaagggatgattgataggtcctgtcattccaaccattcccgtctctggtccgacccttcttcaagcatatttaggccccgcccctcagtctggacaagctccgcctccactccaagctccgcccccggagtccctggcactcccaccaggagctggaagggacttccttagcctctgcccttcgccccaatcccccgacccccacaggagctcagagtttgattcagagcacaacctaacaagcaatgaagggcacagtctgaaaaacctggtgagattgccatctgagccctggggcaggtctgggcggtggaggagcaagggttgcggtgcagccctctcctggtttctgaaccccatcaccactgcctccccaggagcaccgcctaaatgagatggagagaactcaggctcagctgagggatgctgtccagagcctgcagctttctccaaggacgcgggggtcttggagtcaaccccagcccctcaaagcaccctgcctcaatggagacaccacctgagctgcccatcctgcctcatcacacgtggtctgggagcagagagatagccatcttagggggggtgtctgactttgccttagccctacttggcctacagtggggagtggagctgctggtcccaaccactctggcagtatgaagttgcccagtaaaatcttgatttcagtgaaa

SEQ ID NO: 1502 - DNA, 2787 bp, Homo sapiens
ggaaaaacagaaccggagactgctggtcccaaccaggtccacaacgttcgggtaaggcagccagtgaaggtgggaggtagaggggagagccaagactctcggaccctcaaagctgaaagggcactcttgctgggtgatctggagcaggttgctgaccctctttgggcctcagagtcccagtctgtcaaatgaagctaatgaaataacctttctctaggggttgtttatgggaagccaatagagagtgcaggagccaggcagggcagtgcgcagctatagtccaagctactcgggaggctgagcagagagcactgcttgaggccaggagttcaacaccagcctaagcaacatggggagacttcatctcttaaataaataaatgaatagtataggagaatatatgattgatgctttacaaatgggagtttgggccaggcacagtggttcacacctgtaatcccaacattttgggaggctgaagcagaaggattgcttgagaccaggagttcaagaccagcctgggcaacatagcaagtccccaattctacatggtaacattcacctgtagtcccagctgaggcaagaggatcacttgagcccagaaatttgaggctgcagtgagccatgatcgcaccactgtactccagcctgggcgacagcacgagaccctgtcttaaaaaaacaaatgaacaaagaattaggagctgctgattgctcttattattcctgctaatacagcctgagcttggtgttggtcctccaagaccagtagatcctctgggatgtcttgggagggaaggagctgaggaaggagcacagatttctgtccagctgacattcccttccccacaggggttgctcaagaggctgaaagagaagaaaaaggccaggttggagccccgggatgggtaagggtgtatgagaggctggaggggctggggttcaacactggcccctcctcctccacctcctgcatatcattccaatctacaccaaacaccccctgtggcctctgtgttctgccccacatcagttgatgctggggacattgaatgatctagcacagagccagggtgggggcaaagtctgacacaataactctaaaatgggagctaagtcaatcaactggtctgggagggttagggaaggtacccttgagctgagatctgaagggtggatggaagttaactaggccaacaggggggtggaaaaagcattccaggcagaaggaacaacaagtgcaaaggccaagaggccgaaagaagcaactaaaacaaggccaagagggctgggtgaagtggctcccagcactttgggaggccaaagtgggcagactgcttgagtctaggagttcgagaccagcctgggcaacatagtgagaccccatttctacaaaaaatacaaaaattagctaggcatggtggcgggcacctgtagtcccacctactggggaggctgagtgggaggattgcttgagcctgggaagttgaggctgcagtgcacagagatcatgccactgcactccagcctgggcaacagagcaagattgtgtctcaaaaataaatagggctgggtgcggtggctcacacctgtaatcccacagtttgggaggcagaggcaggtggaacatttgaggtcaggagttcaagaccagcctggccaacgtggtgaaatcccatctctacttaaaatacaaaattagccaggcatggtggcgaatgcctgtaatcccagttactcaggaggctgaggcagaagaatcgcttaaacctgggaggtggacattgcagtgagccaagattgtgccactgcactcctgcctgggcaaaagggcaagactccatctcaataaataaataaataaataaatagggctgggcacggtggctcacacctgtaatcccacactttggtgaggctgaggcgggtggatcacttgggatcaggagttcaagaccagcctggccaacatggtgaaaccccacctctactaaaaatataaaaattagaaaattagccaggcatggtggtgggcacctgtgatcccagctacttgggaggctgaggaaggaaaatcacttgaacctggaaggcagaggttgcagtgagctgagatccagccaccgcactaaacaagactctgtctcaaataaataaataaataaataaataggataaaataaaacaaggccagggaggctggagctcagaaagtgatggattaggtggagggagatgaggtgacaacatctggacccagcttggtcatgtaggtcaccaggagttgagtttatcctaaaagcaaggaggtgccatggcggggggtggggggggcacgggggagaaacgggatccgaattgggttgaagtccttcctggccttcctctacccttcaggctatgggggatggggaagaggcaggaatgacggtgtgctcacccacccccttcccagaccccccagtgctctgggctctagggagtcgctggccacactctctgaactggacctgggtgccgagcgggatgtgcggatctggccactgcaccccagcctcctgggggagccccactgctttcaggtaagtgtagacagtccacctcgattccacctcagtcccacctcccaccctttggcttcacccttggcctcgatcacaccgttggattctccatcccaacaggtaacctggacgggtggaagccgctgcttctcttgtcgctcggccgctgagagagaccgctggatcgaggaccttcgtcgccaattccagcccacccaggtca

SEQ ID NO: 1503 - DNA, 8522 bp, Homo sapiens
  SITE (4173): n equals a,t,g, or c
gacaccaccaggagttctcagcccccaaaacctgtcaccgatcctcaccaggctgtttgctctaccctctcccccaactcaagggctcccgtcctcacctccctgcaacactgctcctagaaccatgtctgtctacctggagacagccaggcctattcccttctgggtctccagtgtccctttttctcacaggtgacagtgctggctacaatgctatccagccggtggtggccaagttcctgggggatcctagggctgggccccgaagccctcctcggggatcccagctctgtgccctctatgcctttacttatactggggcagatggcagcaggtgtctctggctgaaggggataggttcctactgcttcgaaagaccaactccgactggtggttggcaagacgcctagaagctccctccacctctcgacccatcttcgtcccagcagcctatatgatagaggaatccatcccttcccagagtccaactaccgtcatccccggccaattgctctggactcctggtgagtaagcgctaagccctctcccttcaccttcctacctcccatcaccttcctacctccctggcttctgggaattttggggaggtccccctccctcaagcttctgctaaccatcttctcttgtttttctttgatcagcctacctcttgcccccgccatggcatcctcatcccactgcctgtcctcctagtcctaaggcttctaggtctcatgccattttccacatcctccctctgcccttcttgtcttccctgtgagttcccaagatgagggacccagttacaacaacacctctgatcacctgccacccaccctccccttttctgtttccagggccgaagttgtttcatggttccctggaggagttgtctcaggccctcccaagcagggctcaggctagctcggagcagcctcctccacttccccgcaaaatgtgtaggagcgtcagcactgacaatctgagccccagccttctgaagcctttccaggaaggaccaagcggaagatccctctcccaggaagacttgccgtcagaagccagtgccagcacagtgagtcacagctcttctgagctgggccctgttctaggcacaggacagacagcacctctgtcttcaggggactcccctggggatgacaaacacaaaaacaaataaataagataacgcttggtactactgataagtctaaaggcaagttaatgtggtggagagtggctgaggtggtgcggggagacatctgtgaggtcacggcattcagttgactctgagcaaggaggagaaagaggcagccgagaggcaaactgggtaggaggtgagaagggacagtaggtaccaaaggccctgaggggacagggcacagggcgcagtggaggcactgaaaggccagccctgtgctcttccttcctccagactcctagcccagggcagggtttttctgtgttctgcttgcctgataggctacagcaggtctcctctagagatgtgacttgcccagcccttccctctctttcttaaccgtgggtggaaaggggctcctcttcccttctgtagacccttctctgtcttcttttaccttgcaggatgtgagggtggggcacccccttcaacattccccccaccccacaaaaagcctgttcccctttcctgtggccctgaggtgggggtggggtgggggaggcgggaagttggcaacaggaagtgaggagaagagcaaagaaaactgtgagagagagaatttttaaaaagcagctggggcctgaggtttctccccagtaccctgggtcacctcagcccagagctggcggtgagaagacaatgggggagggagcaggaggtgggaaggccaagagaagcatgggaagggcaacaggcagaatgaccacctccttcttcccccttttctggcaggcaggcccccagcccctcatgtcagagccccctgtgtactgtaacctggtggaccttcgccgctgtcctcggtccccacccccaggccctgcatgccccctgctgcagaggctggatgcctgggagcagcacctggaccccaactctggacgctgcttctacataaattcactgactggctgcaagtcctggaagcccccgcgccgcagtcgcagcgagacggtgagaccttacctcctgcttctccactgtcccctcaagctcttccttcccctgatgaacctcaaggtagtgtgttttctctccggggctctcagaagatcagaagaatcagccaagtataagaagggtgtggagagtgggtagaggtggcatctggatgtagctttatttcctcctcccctaacccagaaccctggctccatggaggggacacagaccctgaagaggaacaatgatgtcctgcaacctcaggcaaagggcttcagatctgacacagggaccccagaaccgcttgacccacaggtgagatccctcccatctcccagtcacatgcagaaaaagccagcttgttatgactttctgttttgtgtaagacattctccattccccaccacaccccccacctctcacccgtatcccacccctcttcctccttcagccagggatccctgagtcgagcgtttccccacctgtttctccaatcctctcccctagggttcactcagcctcagccaacgcacctcgcagcttgaccctccagccttgcaggcccctcgacctctgccgcagctcctggacgacccccatgtgaatctcccatttctttgtgaaggccaagatcctccctgccccccctccccccttttcctgctccacataaacatcttcctctttctgaatatcctcctacccagccctcccccagcaactttaagggacttcactcctgggagaccccctagggaaagccgtggccactatggagggcgagggtgacttacagatcccattccctccacttcccaggaggtggaaaagtcgggtctgctcaacatgaccaagattgcccaaggggggcgcaacgtcaggtgagaacccagaatacagctagggcctgggctgtcaactccatagggtagagcagggtgttggaagagcaccctcctcgtgtcattctagaatgacctgttcgctaccactacctcccctctctgtccccgcaggaagaactggggcccgtcttgggtggtgttaacgggtaacagcctggtgttctaccgagagccaccgccgacagcgccctcctcaggctgggtgagtgtgagcgagaggcgcaggatgggtgcgggcgctgcctaccgcctcacgccaatgtgggggcggcagcggggagggcggtgcagaggaaagtaaagaagtgaggaagcctcccacctcctcacagcccaccggggagagggaagcagtgaaggaaacaacaccgtggcctcagtttcctccctcattgtcagggaccagcgggtagccggcccgaaagtagcgtggacctgcgcggggcggccctggcgcacggccgccacctgtccagccgccgcaacgtcctgcacgtgagcgccctcccgcgcgtccccaaggccccacccgacccgagggcgcccccaatctcccgcgcaggcctcccgctaggtctccctgcttattatactccttcccgttgacccgagcgtttccttgcctggccctcagatccgcacgatccctggccacgagttcctgctgcagtcggaccacgagacagagctgcgagcctggcaccgcgcgctgcggactgtcatcgagcggctggttagatgggtggaggcccggagggaggctccgaccggccgggaccaagggagtggggtaggaacgataggagtcaggagcagttgggggcagggtgggctcagtggagagcccttgcctgggccgggatgtgggaccccggcagtgggtcagagtccagctagggatacagatttctctcctctctcaccttcgacacggcccgccccgggtctaggatcgggagaaccccctggagctgcgtctgtcgggctctggacccgcggagctgagcgccggggaggacgaagaagaggagtcggagctggtgtccaagccgctgctgcgcctcagcagccgccggagctccagtgaggcgcgggctggggagggagagtccgggagcgcagtgngctcccgggcgctcacgccccgctctacctgcctcctgcagttcgggggcccgaaggcaccgagcagaaccgcgtgcgcaacaaactaaagcggctcatcgcgaagagaccgcccttacaaagcctgcaggagcggggtctgctccgaggtgagggggctgggccaggttcatggataagaaaactccagcgaggctcagagtagagcttcccagaactagaccacaaccttctgtgactgctgctttcccactaccccagattgtttaggggagaagctggggtgacctgtacccctttgccagattgtttgaagcaggggaagggaggtggagtgtatttccttgcccaggcctggcacaggcagccaggaggaccagcctcacttaaggataaagacctatgctgagaagagctcctgtgagtgacgctggcactggcttcccgcctcactctacttccccagaccaggtgttcggctgccagttggaatcactctgccagcgggaaggagacacggtgcccagctttttgcggctctgcattgctgctgtggataaaagaggtcattttctcagagaccccagaatcctcttccaacaggctaaggcctagaattttctgcctcccccattctacctagtcttcctactgccctttttctctccacccttatatccctcaccacacacactttcaagcagcagtccttatctactccttcctcatctcccaggtctagatgtggatggcatttatcgggtgagcgggaacttggcagtggtccagaagcttcgctttctggtggacagaggtgagaaggcttgtgggccagtggttgtactaagaatgtcttgcctgagaaccatgggcggtcctacatgaggaagctggcagaatagagaggccgtcaggctggaagtgtatgtcttagctcctgatctctcctcattcatgttgcagagcgtgcggtcacctccgatgggaggtatgtgttcccagaacagccaggacaaggtacttacatggaagacccttcagatccctaaaacttccacatatcctctttgcttcccgtggaaacccccatgtactattcctgggagggttgtcctcatccccaccttagctaccttgccccactgcagaccctctaggcattcctatagtctgctttgactggatttctccagaacttctaatctctcagtctctaaatctttctggcccttcatgagcccctatacctccttctccctccagaaggtcggttagatttggacagtactgagtgggatgacattcatgtggtcaccggagccctgaagctttttctccgggagctgccccagcctctggtgccaccactgctgctgccccatttccgtgctgcccttggtaagggttggagctttggaaagaacccttgatgtgggggacacgggtggtaaataatagaatagaggttcccttatactcttctttcccattctgactttagagatggaaaataatgttcaactcaggtgcctactccagttgcttttttgtgaatgtttagagggctgaattgaaaagaattatgaggctatagttgggctatgtgaaaaagaaagctgtgctagattaatgatgtcttccatgcctgtgggaaagagcagtgcatttacccatcctgtcctagcaccttccctaaccttactaccatgcctttcccatcactctctctagcactctccgaatcagagcagtgcctctctcagatacaagaattaataggctcaatgccaaagcccaaccatgacactctacggtacctcctggagcatttatgcaggtcaggaagacagaacctctttgttcatgctggggaaaggtggagtggggaatgccacagggactctgtgcaggtggagtgaaggtagggaagcacctaagtttaatgggcaggtgaggaagcaggcaacctctgtgcaggagcatattaccagagtcaaaacctttatttttttattttatttatttttgagacagagtctcgctctgtcacccagactggagtgcagtggcgcaatttcagctcactgcaacctctgcctcccgggttcaagtaattctcctgcctcagcctcctgagtaactgggattacaggtgcccgccaccacgcctggctaatttttgtatttttagtagagacggggtttcaccatgttggccaggctggtctcgaactcctgacctcaggtgatttacccacctcagcctcccaaagtgctgggattacaccgtgcccgtcaaagactttaggtcaaaacctaaaggtcagcatcaagtggggaaatggaaccaagatgctgtgaaaggaataagggaaatcttacttctcccttccctctgcctctttgtctcccattgggacattgctgatggcttctttggttgaactgggcctgggcagtgacttctgagagaggatggccacttgaattaaagactcccaaactgtgagcaggcagaactcttggggcagcccctgaagtcggaagaggcagttatatcttcaggttgtatcctgaaggtttctccactggtccatctccattctccttgtatctccttggtttttttgttaccatgtggaggaatcccagagtgaactcttccctgctcagaactttgaagggttagttagattgctatgaagtggcaagctgctgccatatatccccttccttggcctttgcttacagggtgatagcacactcagataagaatcgcatgacaccccacaacctgggaattgtgtttggaccaaccctgtttcggccagagcaggagacatctgacccagcagcccatgctctctacccagggcagctggtccagctgatgctcaccaacttcaccagcctcttcccctgatgcagggaaggaagaagagaaaacatatttccggtcatctctggtggtgagaggctggtgttctgttttgaggatatccctttaaatctcccaaatgactgtctctatcttcatgagtgtgacttgaggtgttgggatgggtgagggagcttctctaaagaggaaagtgagtggattaacccctgcttctcttcttgttccctgttatcattcctccccaacataataatacataaagtggcatggtattttttctgatgcagttcctttattatcaggaaacagtgtcattatcaaatttctcctcaaaacgtatacagactatacatagcccccagcccatacctcccatccctggggcatcttgtgcatgggactgcagctcccccaatttttctggaaggatagaaaccccttaggaaatgcgatctgtgatggatgagattccctactctttaggcactagagttgaggaattctgtttccccaggtagggatctcagtaagacactcatgttgcccacagccatgttggggggcccagagggaggtggggtatgtccagagctgccccgctgatcatgggaaggaggaggactcagcccctggggctcatccagaatagccacaaagtccagctgagtgttgtcaagatcaagagagtccagggggttacatacctgtccttcgggaggagggtacaaggcaggaccccctcctagcctgcccacctcaggatgaccacagctggggtttgtgcctcccactttgagaggcccatagcaagtgggcaatgggggcagaagtcgaggtggtgctgctgccctatgtgaagccctatttgcccccactacaaaattttcatggcatggtgaaggggtgggataggaacctgacttgtgattgggcaagttgggtccaaagccaggtccatatgtgttcactggagctttagcacggcttgggctaacctgggaaccccccagaaacttgggactctggtaggaaggttcctgggcgggggcatcttccctgcccccaccctcccacagtagctcctgttgagattgaacataattacacacaagctgagccttgagctgccctgtggaatgggtgggggaatcaaagtccaggcaaggcctgggttctgaaggaagataatcagggggtggctgggtataggggcctgactggagatattggggaggagagggctgggggtaatgggaaaagagaggctgtggatgtgggggcccctcactggggtgggcattgaggcagggtgccagtcctgtggagtcagaccccactgggcacccctgttctggcttgacttgcacttgtccataatgttcaagtcgaggacactggctgtaggttccacctagagccttggggcctgggtacagcccagagtgggaag

SEQ ID NO: 1504 - DNA, 14486 bp, Homo sapiens
gacaccaccaggagttctcagcccccaaaacctgtcaccgatcctcaccaggctgtttgctctaccctctcccccaactcaagggctcccgtcctcacctccctgcaacactgctcctagaaccatgtctgtctacctggagacagccaggcctattcccttctgggtctccagtgtccctttttctcacaggtgacagtgctggctacaatgctatccagccggtggtggccaagttcctgggggatcctagggctgggcccccgaagccctcctcggggatcccagctctgtgccctctatgcctttacttatactggggcagatggccagcaggtgtctctggctgaaggggataggttcctactgcttcgaaagaccaactccgactggtggttggcaagacgcctagaagctccctccacctctcgacccatcttcgtcccagcagcctatatgatagaggaatccatcccttcccagagtccaactaccgtcatccccggccaattgctctggactcctggtgagtaagcgctaagccctctcccttcaccttcctacctcccatcaccttcctacctccctggcttctgggaattttggggaggtccccctccctcaagcttctgctaaccatcttctcttgtttttctttgatcagcctacctcttgcccctgccatggcatcctcatcccactgcctgtcctcctagtcctaaggcttctaggtctcatgccattttccacatcctccctctgcccttcttgtcttccctgtgagttcccaagatgagggacccagttacaacaacacctctgatcacctgccacccaccctccccttttctgtttccagggccgaagttgtttcatggttccctggaggagttgtctcaggccctcccaagcagggctcaggctagctcggagcagcctcctccacttccccgcaaaatgtgtaggagcgtcagcactgacaatctgagccccagccttctgaagcctttccaggaaggaccaagcggaagatccctctcccaggaagacttgccgtcagaagccagtgccagcacagtgagtcacagctcttctgagctgggccctgttctaggcacaggacagacagcacctctgtcttcaggggactcccctggggatgacaaacacaaaaacaaataaataagataacgcttggtactactgataagtctaaaggcaagttaatgtggtggagagtggctgaggtggtgcggggagacatctgtgaggtcacggcattcagttgactctgagcaaggaggagaaagaggcagccgagaggcaaactgggtaggaggtgagaagggacagtaggtaccaaaggccctgaggggacagggcacagggcgcagtggaggcactgaaaggccagccctgtgctcttccttcctccagactcctagcccagggcagggtttttctgtgttctgcttgcctgataggctacagcaggtctcctctagagatgtgacttgcccagcccttccctctctttcttaaccgtgggtggaaaggggctcctcttcccttctgtagacccttctctgtcttcttttaccttgcaggatgtgagggtggggcacccccttcaacattccccccaccccacaaaaagcctgttcccctttcctgtggccctgaggtgggggtggggtgggggaggcgggaagttggcaacaggaagtgaggagaagagcaaagaaaactgtgagagagagaatttttaaaaagcagctggggcctgaggtttctcccccagtaccctgggtcacctcagcccagagctggcggtgagaagacaatgggggagggagcaggaggtgggaaggccaagagaagcatgggaagggcaacaggcagaatgaccacctccttcttcccccttttctggcaggcaggcccccagcccctcatgtcagagccccctgtgtactgtaacctggtggaccttcgccgctgtcctcggtccccacccccaggccctgcatgccccctgctgcagaggctggatgcctgggagcagcacctggaccccaactctggacgctgcttctacataaattcactgactggctgcaagtcctggaagcccccgcgccgcagtcgcagcgagacggtgagaccttacctcctgcttctccactgtcccctcaagctcttccttcccctgatgaacctcaaggtagtgtgttttctctccggggctctcagaagatcagaagaatcagccaagtataagaagggtgtggagagtgggtagaggtggcatctggatgtagctttatttcctcctcccctaacccagaaccctggctccatggaggggacacagaccctgaagaggaacaatgatgtcctgcaacctcaggcaaagggcttcagatctgacacagggaccccagaaccgcttgacccacaggtgagatccctcccatctcccagtcacatgcagaaaaagccagcttgttatgactttctgttttgtgtaagacattctccattccccaccacaccccccacctctcacccgtatcccacccctcttcctccttcagccagggatccctgagtcgagcgtttccccacctgtttctccaatcctctcccctagggttcactcagcctcagccaacgcacctcgcagcttgaccctccagccttgcaggcccctcgacctctgccgcagctcctggacgacccccatgtgaacctcccatttctttgtgaaggccaagatcctccctgccccccctccccccttttcctgctccacataaacatcttcctctttctgaatatcctcctacccagccctcccccagcaactttaagggacttcactcctgggagaccccctagggaaagccgtggccactatggagggcgagggtgattacagatcccattccctccacttcccaggaggtggaaaagtcgggtctgctcaacatgaccaagattgcccaaggggggcgcaagctcaggtgagaacccagaatacagctagggcctgggctgtcaactccatagggtagagcagggtgttggaagagcaccctcctcgtgtcattctagaatgacctgttcgctaccactacctcccctctctgtccccgcaggaagaactggggcccgtcttgggtggtgttaacgggtaacagcctggtgttctaccgagagccaccgccgacagcgccctcctcaggctgggtgagtgtgagcgagaggcgcaggaggggtgcgggcgctgcctaccgcctcacgccaatgtgggggcggcagcggggagggcggtgcagaggaaagtaaagaagtgaggaagcctcccacctcctcacagcccaccggggagagggaagcagtgaaggaaacaacaccgtggcctcagtttcctccctcattgtcagggaccagcgggtagccggcccgaaagtagcgtggacctgcgcggggcggccctggcgcacggccgccacctgtccagccgccgcaacgtcctgcacgtgagcgccctcccgcgcgtccccaaggccccacgcgacccgagggcgcccccaatctcccgcgcaggcctcccgctaggtctccctgcttattatactccttcccgttgacccgagcgtttccttgcctggccctcagatccgcacgatccctggccacgagttcctgctgcagtcggaccacgagacagagctgcgagcctggcaccgcgcgctgcggactgtcatcgagcggctggttagatgggtggaggcccggagggaggctccgaccggccgggaccaagggagtggggtaggaacgataggagtcaggagcagttgggggcagggtgggctcagtggagagccctggcctgggccgggatgtgggaccccggcagtgggtcagagtccagctagggatacagatttctctcctctctcaccttcgacacggcccgccccgggtctaggatcgggagaacccccctggagctgcgtctgtcgggctctggacccgcggagctgagcgccggggaggacgaagaagaggagtcggagctggtgtccaagccgctgctgcgcctcagcagccgccggagctccagtgaggcgcgggctggggagggagggtccgggagcgcagcgaggctcccgggcgctcacgccccgctctacctgcctcctgcagttcgggggcccgaaggcaccgagcagaaccgcgtgcgcaacaaactaaagcggctcatcgcgaagagaccgcccttacaaagcctgcaggagcggggtctgctccgaggtgagggggctgggccaggttcatggataagaaaactccagcgaggctcagagtagagcttcccagaactagaccacaaccttctgtgactgctgctttcccactaccccagattgtttaggggagaagctggggtgacctgtacccctttgccagattgtttgaagcaggggaagggaggtggagtgtatttccttgcccaggcctggcacaggcagccaggaggaccagcctcacttaaggataaagacctatgctgagaagagctcctgtgagtgacgctggcactggcttcccgcctcactctacttccccagaccaggtgttcggctgccagttggaatcactctgccagcgggaaggagacacggtgcccagctttttgcggctctgcattgctgctgtggataaaagaggtcattttctcagagaccccagaatcctcttccaacaggctaaggcctagaattttctgcctcccccattctacctagtcttcctactgccctttttctctccacccttatatccctcaccacacacactttcaagcagcagtccttatctactccttcctcatctcccaggtctagatgtggatggcatttatcgggtgagcgggaacttggcagtggtccagaagcttcgctttctggtggacagaggtgagaaggcttgtgggccagtggttgtactaagaatgtcttgcctgagaaccatgggcggtcctacatgaggaagctggcagaatagagaggccgtcaggctggaagtgtatgtcttagctcctgatctctcctcattcatgttgcagagcgtgcggtcacctccgatgggaggtatgtgttcccagaacagccaggacaaggtacttacatggaagacccttcagatccctaaaacttccacatatcctctttgcttcccgtggaaacccccatgtactattcctgggagggttgtcctcatccccaccttagctaccttgccccactgcagaccctctaggcattcctatagtctgctttgactggatttctccagaacttctaatctctcagtctctaaatctttctggcccttcatgagcccctatacctccttctccctccagaaggtcggttagatttggacagtactgagtgggatgacattcatgtggtcaccggagccctgaagctttttctccgggagctgccccagcctctggtgccaccactgctgctgccccatttccgtgctgcccttggtaagggttggagctttggaaagaacccttgatgtgggggacacgggtggtaaataatagaatagaggttcccttatactcttctttcccattctgaccttagagatggaaaataatgttcaactcaggtgcctactccagttgcttttttgtgaatgtttagagggctgaattgaaaagaattatgaggctatagttgggctatgtgaaaaagaaagctgtgctagattaatgatgtcttccatgcctgtgggaaagagcagtgcatttacccatcctgtcctagcaccttccctaaccttactaccatgcctttcccatcactctctctagcactctccgaatcagagcagtgcctctctcagatacaagaattaataggctcaatgccaaagcccaaccatgacactctacggtacctcctggagcatttatgcaggtcaggaagacagaacctctttgttcatgctggggaaaggtggagtggggaatgccacagggactctgtgcaggtggagtgaaggtagggaagcacctaagtttaatgggcaggtgaggaagcaggcaacctctgtgcaggagcatattaccagagtcaaaacctttatttttttattttatttatttttgagacagagtctcgctctgtcacccagactggagtgcagtggcgcaatttcagctcactgcaacctctgcctcccgggttcaagtaattctcctgcctcagcctcctgagtaactgggattacaggtgcccgccaccacgcctggctaatttttgtatttttagtagagacggggtttcaccatgttggccaggctggtctcgaactcctgacctcaggtgatttacccacctcagcctcccaaagtgctgggattacaccgtgcccgtcaaagactttaggtcaaaacctaaaggtcagcatcaagtggggaaatggaaccaagatgctgtgaaaggaataagggaaatcttacttctcccttccctctgcctctttgtctcccattgggacattgctgatggcttctttggttgaactgggcctgggcagtgacttctgagagaggatggccacttgaattaaagactcccaaactgtgagcaggcagaactcttggggcagcccctgaagtcggaagaggcagttatatcttcaggttgtatcctgaaggtttctccactggtccatctccattctccttgtatctccttggtttttttgttaccatgtggaggaatcccagagtgaactcttccctgctcagaactttgaagggttagttagattgctatgaagtggcaagctgctgccatatatccccttccttggcctttgcttacagggtgatagcacactcagataagaatcgcatgacaccccacaacctgggaattgtgtttggaccaaccctgtttcggccagagcaggagacatctgacccagcagcccatgctctctacccagggcagctggtccagctgatgctcaccaacttcaccagcctcttcccctgatgcagggaaggaagaagagaaaacatatttccggtcatctctggtggtgagaggctggtgttctgttttgaggatatccctttaaatctcccaaatgactgtctctatcttcatgagtgtgacttgaggtgttgggatgggtgagggagcttctctaaagaggaaagtgagtggattaacccctgcttctcttcttgttccctgttatcattcctccccaacataataatacataaagtggcatggtattttttctgatgcagttcctttattatcaggaaacagtgtcattatcaaatttctcctcaaaacgtatacagactatacatagcccccagcccatacctcccatccctggggcatcttgtgcaggggactgcagctcccccaatttttctggaaggatagaaaccccttaggaaatgcgatctgtgatggatgagattccctactctttaggcactagagttgaggaattctgtttccccaggtagggatctcagtaagacactcatgttgcccacagccatgttggggggcccagagggaggtggggtatgtccagagctgccccgctgatcatgggaaggaggaggactcagcccctggggctcatccagaatagccacaaagtccagctgagtgttgtcaagatcaagagagtccagggggttacatacctgtccttcgggaggagggtacaaggcaggaccccctcctagcctgcccacctcaggatgaccacagctggggtttgtgcctcccactttgagaggcccatagcaagtgggcaatgggggcagaagtcgaggtggtgctgctgccctatgtgaagccctatttgcccccactacaaaattttcatggcatggtgaaggggtgggataggaacctgacttgtgattgggcaagttgggtccaaagccaggtccatatgtgttcactggagctttagcacggcttgggctaacctgggaaccccccagaaacttgggactctggtaggaaggttcctgggcgggggcatcttccctgcccccaccctcccacagtagctcctgttgagattgaacataattacacacaagctgagccttgagctgccctgtggaatgggtgggggaatcaaagtccaggcaaggcctgggttctgaaggaagataatcagggggtggctgggtataggggcctgactggagatattggggaggagagggctgggggtaatgggaaaagagaggctgtggatgtgggggcccctcactggggtgggcattgaggcagggtgccagtcctgtggagtcagaccccactgggcaccctgttctggcttgacttgcacttgtccataatgttcaagtcgaggacactggctgtaggttccacctagagccttggggcctgggtacagcccagagtgggaagggaactcaccccatgtttcttgggtggggtcaggatatgaggcctgctggggacaggggttggggccatagttggtgggtggaccaggcccaagaggcagagagcctggacccctcgctccataaggctcagctgctgccccttcaggtcccccatatcccagagtatcagtaggtgggaagtccatataggggttcagaccactgcccaccatggaggtcccaacttctggctcttcctgtagccctctagcatccatggcagcattctcagtgatgctggggggctgtggtgagtagacagaggttgggaggtaaggatcaaagttctgtcctccccctgccacagtgggtggggtatggacacagcccaggctcttgaacctctggactctagctggagcaggacggtcagcagcctgggctgggtcactggccctccgggtgacccctgcattggggttgtatcctggatactcggctcggcttctccaaggaggcatgggaagaccacctatccgatccaggctggatgctgcagtgggcgaagtaccaccccctctggctgaagcatatcttgcccgaagcaggtagtgctgggcaggcataaggccaggcagggaggatgctccattctctggtggggagccaggggggaaaggagaggccagggaggagcggcggctgacagtataggcagagctgatgctgctggagctgctgctgcggcgttcaagagagactggggggcccacgcggcgggacacagtggtacctgcaagtgatggggagaaaaggtaggatggtcaaggagcttcctaaatttcaccctgcctcctccatgcaacagccttgccctggattctcaggggtaagctcgttatccctaaccagtctgttctgtctcctacttctcccatgcctattctgtttctgggttaccaaggattcagggttgctatgaacagttgtgcaggttgtgtgctgcacaatcctagggaacagcattcgcatcatagcctttgcatacttgtttgtttgtttgttttgttttgttttgtttgaaacagagtttcgctcttgttgctcaagttggagtgcaatggcgcaatctcagctcactgcaacctctgcctcccaggttcaagcaattctcctgcttcagcttcctgagtagctgggattacaggtgcccaccaccatgcctggctagcctttgcatgtttgtacatcacaactattttctgataaatggaaagtgtcttgaggaaggacaccattttctaattatacaaaagtgctgtgtgacagccctcaagggtgacttcctcctctcaacctcagggcaggtccagatctcaccccagccacacctcccacacccaggtctcaccggtgtgggacaagctgggcagtttgagaccccgggtccctattggccggagttgatgtagctggtccagcctgaggttctcaaggcggcgaagagtggacagaccagtgccagcaatgcaaggtccctcgtccaagctggagaggtcttcagtgctgccccctgcattgccagtcatttccacaccactgtctgtattggctgcactccctgccggggagtggtcactgctgcaggatgactgggccccagggcttggctgtggcttctgtggagaagatgaggtctgagggcaacacccttccccacagctccttcaacttgatgagtggctgaagcctgtgtcccagtgactgctggggttccaaggaagcttgtaagtgtagaaagggctaagcaggtaagagatgggggagcaaactgaatgtgagacgtttgatgagaagaacctaggctggagcacggactggctggactcaaattcttgctcttagttctatgaccttgggctatttctctatgcctgagtttcttcaactgaaaatgggaacagtgagtccctttatcatgaagttgctgtgaggagtacatgaaattatacatgtaaaaggcttggaacatatactaagtgctatttaagaaagagttgccgggtgcagtggctcacgcctgtaatcccaacactttgggaggccgaggtgggcagatcacgaggtcaggagatcaagaccaccctggttaacacagtgaaaccccatgtctactaaaaatacaaaaaaattagcccggcgtggtggcaggcgcctgtagtcccagctactcaggaggctgaggcagaatggcgtgaacctgggaggcggaggttgcagtgagccgagatcatgccactgcactccagcctgggcaacagagcgagactccgtctgaaaaaaaaagaaagagtttgggttggatgcattggctcatcccagcactgtgggaagctgaggtgggaggatcgctcaaggccaggagtttgagaccagcctggtcaacatagcaagactcgatctctaaaaagaagaaaaattagccaggcatgatggggtgtgcctgtagtgatcacttgagcccagaagtttgaggctgcagtgagctatgattatgccactacactccagcctgggcgacagagcaagactctgtcagaaagaaagagagaaagagagagagagagaaagaaagaaaggaagaaaggaaagaaggaaagaaggaaggaaggagagagagaaagagagtgagagagtgagacagaaagattctaaaacctctagatttggggaagcccaaagagcaacactaagacaagagacaggcagactggtcacagaagagtgacttctataggagggaatggatgggttgggaagtaactagaaagatgtccacagggtgggctggggtatggaggtgagggttgcctgggctctctcaccatggcaccctctggcacagtcagtctgctttcctccctgatgggacctccttcccgctccctcttgggctccactgtagaaatggatggtgcccgaggcagggggccatccccacggtgccgtttggtcacatgggcgtcaggaccatgcactgtcttgacatgttttcgcagcgagctaggatctgtatagcgtttggtgcagccagggagcttacatacatacggcttctgttgagtggagagtggagacagaaggcaaacggatcaaagcggaagaatgcagaagaaatgggaaaaagtggtgacaacacagggggcaggggaggagcacacagcaccaaaggaagtaaggaggatggaggcctccggtgggagtcaaagatgcagagattaagtggagggttaggaaaactgacagcctgggaaagatgagggggtgaacccagggctgtgaggtcccataaatccaggggttggagggatcaggggtctcctctagatggaatcttttaggttagccttttggctggttagaggttagaggtaggaggaggagtggttaagtggaaattttgggtttcaaaaaaggctttttctgggcgaattatgtggggaggggcactcacctctatgaagtgatgctgagctaagggatttcttatggggaatctccctggtaggtggcttctcaagaggggagggtcgcttagttagggcattcacctcattggaatgggtccgattctggtgcttggctcggtcactggcattgctgaaggctttactgcagccctcgtgctcacacatgtatggcttctcacccgtgtgtgaccgcaggtgcgtcttcaggttttcgaggcgtgagtatgacttccggcacccttcaaactgggggacatgcaggggtcaaaggatagttctcagacagaggacatggagatggaaggaaccctcaatctccaacaggacacacatcagagaatataactcaagatgaaaggcactggggcttcgagagaattcccaaaactaggggacaagggcaggcaagaacttggagaagggaagcagttggaggcactctccctttgggaatataaagatgctagagcatcttctgaccaagccagggcagatttctctgcatggggatcttaggctgtcccaagatggggtcatcttgggggaacgggctgttgtccttgatgcagggtttatccattaggcagagtagtaggcacagtactgaaggccaagcaatactttaagagcccacgaacatgttttaatgtcttttttaaaaaaaattttttttttgaggcggagttttgctctgtcgcccaggctggagtgcagtggcgccatctcagctcactgcaacctccacctccttggttcaagtgattcttctgcctcatcctcccaagtagcagggactacaggcgcccatcaccacgcccagctaatttttatattttttagtagagacagggtttcaccaatattggccaagctggtctcgaactcctgaccttgtgatctgcctggctcagcctcccaaagtgctgggattacaggtgtgagccaccgtgcctggcctgttttaatgtcttttaaaatcaaggggaaaaaaatgagcttttaggtccaagagtgttttaatatatatcatcatattcatctttatgccaacacagtcacacaaacattatttttaatatttgtttatggaagaaaggacttataaaagcaaaagtctgccttgggccctaccttgaaggagagccctgatttaggaagagaccctggacttgggacactggtgcctcaccgtgcacttgtgtggcttctcgccagtgtgtctgcgcatgtgaaccaccagcatgtactgggctttgaagggcctcagctccctggagcagcccccccagtggcacacgaactccttccgctccccgtggatgtgctcgctgttgatgtgctgagggagaagatacaaaggctctccaaggctctcccatgaccctgaggtccagaacagaccttccctccaccccctgttcctcttccacgactccacctcaaggaggaagaggcaggagcaatatcatatctcacatctcaggtcttccagctccctaaggcaaagctacaacttctgagcttctgcctacccaactgagcattcaacctcagtctcctctgacctcctgccctcagccggattccaccatgtcccactcagaatctcctaaaggttctggctagccattcctgttaccccctggggctcacgtgcaccagctgctcttgggagtcaaattcctggctgcagccatcccaacggcagtcagtttcatacacagattcaggctcacgcttctcctctctctcgaggtcctcccgcccatccagcatccccaacaggggatcctagggcaagagaggcaatctcagggtcacttgggtgacagctttagttttgctcaggtcccagaggtaaagctcctgcccatccccttacctgtatgcctgtggagttggggctggacatatcaccttccaagggttcctcccggcacttgccaaccagcatgtccagctcagacttcagcttccccaggggaagaggtgacggtgatgagggtggaagtaagcagaaggaagaggaaaccaagccaggtcttcctgccctaagtgcccccacccaagcagctggaacctcctgggtttggaagggacttcctcctcagactacactggtgaatgggatgggcaaaaggtgggatcccatttggaagcgtctgactcaactgcaaggagtgaaccccagcacccacacctctttacttttctagtactgaaaacttatatcccttgtccttccttcacctttcccctacaaaatccaccacccacccaccctgagctgagggaaatcaggtagcaatatggggactctcacctggcaagttgggaagggtccccgggactgaggatgtgggatcatcccaccccgggcagagtcatggggaccacaaaggctggaccccaaaggaaggcgagggccctttttggtgattcatctgggc

SEQ ID NO: 1505 - DNA, 770 bp, Homo sapiens
agtggccaggtaaggcagaagcagaagtgtgggttttaaagtgctggtaatccagggaaggtcacttcccaccttccaccaaggagaagctggcatcagtcccctatctacctgtcatagcgtcttgcattacttgtccattgttcctgattcaattgtaattattaagtttattgtgtcattagttaaggtctgtctctccttaagctccaaaagggctcattcccttctctcatctccagtgcctgacactgctccttgcacgcaggaggcactcaatcaatccttgataaaagcataaatgaggccgggcgcagtggctcacacctgtaatcccagcactttgggaggctgaggcgggtgaatcacctgaggtcaggagttctagaccagcctggccaacatggtgaaaccctgtctctactaaaaataaaaaaactagccaggtgtggtgacaggcacctgtaatcccagctactcgggggactgagacaggagaatcacttgaacccggggggcggaagttgcagtgacccgagatctcgccatcacactccagcctgggggacaagaacgagacttcgtctcaaaaaaaaaaaagcatgaatgaacccacacactaaagtagctcctgcctcaagaggcttgtgtgtacaggacagtatcaaggcttctcagctcccaaaatcgtgtcctggattgggagggtggtgatatttcaactctgaatccctctgtgctcgtccactttgtctttctctctgatttgg

SEQ ID NO: 1506 - DNA, 771 bp, Homo sapiens
agtggccaggtaaggcagaagcagaagtgtgggttttaaagtgctggtaatccagggaaggtcacttcccaccttccaccaaggagaagctggcatcagtcccctatctacctgtcatagcgtcttgcattacttgtccattgttcctgattcaattgtaattattaagtttattgtgtcattagttaaggtctgtctctccttaagctccaaaagggctcattcccttctctcatctccagtgcctgacactgctccttgcacgcaggaggcactcaatcaatccttgataaaagcataaatgaggccgggcgcagtggctcacacctgtaatcccagcactttgggaggctgaggcgggtgaatcacctgaggtcaggagttctagaccagcctggccaacatggtgaaaccctgtctctactaaaaataaaaaaactagccaggtgtggtgacaggcacctgtaatcccagctactcgggggactgagacaggagaatcacttgaacccggggggcggaagttgcagtgacccgagatctcgccatcacactccagcctgggggacaagaacgagacttcgtctcaaaaaaaaaaaagcatgaatgaacccacacactaaagtagctcctgcctcaagaggcttgtgtgtacaggacagtatcaaggcttctcagctcccaaaatcgtgtcctggattgggagggtggtgatatttcaactctgaatccctctgtgtttctcccactttgtctttctctctgatttgg

SEQ ID NO: 1507 - DNA, 277 bp, Homo sapiens
tagtttgagggcttgagacttttaatggacttgggtaggggctttaggggcctcttggcccggggctgactgcacctcatggtgccaatggagagatgaccgtaggagcctcctggagatgtgcatcgcgagttgatgaaagctacgagggagctgggtgaggtgcggataaccgtctgcaggtccaggctggcatccgacagaggtgagatggacagtgcccgcttcttggtcaacttgactgcactccggggagaagaaaagagtgggcctgggg

SEQ ID NO: 1508 - DNA, 32193 bp, Homo sapiens
  SITE (4975): n equals a,t,g, or c
  SITE (4976): n equals a,t,g, or c
  SITE (31313): n equals a,t,g, or c
ggctgggccctgcagcattgtgaggttggcccatggagagctggtgggagccagcagctgcctggggctgattttggccagatgctatctgactgttgtttctccctggtgctggcacagctgcagatacagggtccttcggtttgggaggactaagaggagtaaaagtcaagttagacgtcagacaatcccagctagaaaatctgaacatactgcacataaaacataagattccaagcagagttttcacttcggcaggcaggaaaaggatctgaaattctaactagctcacactgggcttataaagctaatgtttacttggtgccatataaagagctaatgtttacttggtgccattttttttttaagagatgaggtcttgctatgttgcccaggttggtctcaaatttctggactcaagcaatcctctcctgcctcagcaccctgagtagccgggactataggactatttattttatgagattcgttgcatcagactggactccaacgactctgccactccagtatcatcagagagaccatttcaaagcaaccaatgcggagttttcagttctactgcgtttggacttaaattgggcagtacttaataccatgaaatggcttttacatgttgacatatacactgtacaaaactaagcaaaagccatggcaaaataagaccctaaatgataaagggcttgattattatcaataacttggactgaagaaggagaactcagaggctaaatgactactcgaagtccagagttggtagcagcaggatagagatcagaattcaggcttcctgtttcctggcccagaactttttataccaactctgtagctccattttgtcaaggtcaccaaagagtgaataacattagtgtaatgtacataaaaatacctacagaatacagtataaaaaacaaacagcaggccaggcacagtgactcacgcctgtaacgccagcactttgggaggctgaggcacatggatcacttgaggtcaggagttcaagaccagcctggccaacaaggtgaaaccccgtctctactaaaaatacaaatattagccaggcgtggtggcgcatgcctgtagtcccagctactctggaggctgaggtgggagaatcgcttgaacccaggaggtggaggttgccgtgagtcaagatcatgccactgcactccagcctggctgacagagcgagatgctgtctcaaaaaaaaaaaaagcaaagtaactgacattccatttgtccttctgcattaagactaattattgtcttaaataatacatttagccttgattaaacaaatggaatgtcacaaggaaatgaaaatatgtaaattggctgggcatggtggctcatgcctgtaatcccagcactttgggaggttagggagggaggactgcttgagaccaggattgaagaccagcctgggcaacacagtgagacctcgtctctacaaaaatttaaaaaaattagctgggcatggggatgcactactatagtcccagttgggaggctgaggtgggaagatcgcttgagcctgggagattaaaaggctgtagtgagccatgatcacaccactgccctccagcgtgggtgacagagcaagaccctgtctgaaaaaaaaaaaacaacaaaaaacaggccggggcagtagctcacgcctgtaatcccagcactttgggaggccaaggcaggtggatcacttgaggtcaggacatcgcgaccagcctggcaaacatggtgaaaccccatctctactgaaaatacaaaaattagccaggcatggtggtccatgcctgtaatcccagctactccggcggctgaggcaggagaatcatttgaacccaggaggcagaggttgcagtgagccaacattgcaccactgcactccagcctgggcaacagagcgagacttcgtctcaaaaaataaattaataaataaaaataaataaaaataaaaaacaaaaccaagaaaaagaaaataagtgaatttgcttagacttttttccttcaaacaaaaaaatttaaaccaaaacaagtacatgcatagggcacaattattgacaagctaacgtgcagcctatgaggtgcacgggaagccctaagaagtctgaagtcttaattttttttaaccccaaagtaaactttcccaaggtgaagaaaatggaattcaggaatgcacaaagcattcagcattcagttttaatggtgaaacaagattcctatctcacgagcagcttcacacacaacaaggctctcccttgctcatcccaaggacgatgagaaaggagttctttcaaggcaaattcatctctctgtgtgggaaataaacgtgtggataaacagcctgtccttgttttgtgcacatttattttacttcatatatgatcattcggtgtgttgtggatggccaatgcagaacatatgacaacaaaaattttggcacacatgtatgcaaagctaagcagctgtcagttccaaaccacaagagatgccacctgaagtagcctctggtggtcatctgcctggatcagtgtggagaactgaattaatgtcaattaaataaaaatctcaagttatggctgggcgcggtggctcacacctgtaatgccagcctttgggaggccaaggcagggggatcacctgaggtcaggagtttgagaccagcctgaccaacatggcgaaaccctgtctttactaaaaatacaaaaaaattagcctggcatggtggtgtgtgcctgtaatcccagctactccggaggctgaggcaagagaatcacttgaacccgggagacggaggttgcagtgaaccgagattgcaccactgcactccagcctaggcgacagagtgggactgtctcaaaaaaaaaaacctcaagttcaaggtgacttttcttaaaagttgctatccatttgcagcccactccaggtggcttatccaaaggttaagcaactaaaagagccttttaagaaaatctaccagctaggcatggtggctcatgcctgtaatcccagcattttggaaggctgaggcaggaagatcacttgaggccaggagttcgagatcagcctgggcaacctagggcatctatgtttaccccatctttacaaaaataaaaaaattagctgggcatggtgacaagcacctgtaatcccagctacttgggaggcttaggtaggaggattgcttgggcctaggaggcggagggtgcagtgagctacgattatgccactgcactccagcctgggcaacagagcaagacgcagtctcagaaaaaaaaaaaaaaaaaagaaaaaagaaaagctaccatcttattttccaccttggactcatggatcaactgccctacaagactgaaatctgggggtgtggagtggagtcttagtcacctcatgtgcctagcacatatcagtgactcagtaaatctgtttcactgaatcaatcaacgaatgggtgaataaatgccaggaatacgaaaatttaactaacttgccacactcaaatgcttcctggttagcacactggatgacaatgaacagaaggtacatgaatgctgacagtatacatccaacaggtgacagaggctcatcacactatgagacatccactggcttccggtttccagcaccaaagcagtgtggcaaagaatgcaaaccaatgttgctttctttggaaaacataaaaagaagcgagccattcatagtctttttttccatcttttgccaaccagaggagtgaaagtaaatctgttcactccatgctggagcagttctttgggcatggatgccgtgctcaaaggccaccacctgcaagaaggctggggcgtccagcctccactgccagcagaagtcagcctccttacctgccgtcgcctgggctcggcccctgctccagtatgcccgcggaagaggggacagtcccacccccagagctgctttcagccctagagctctggggagggggctctgggccagcgggcaccacggtgctgccatctgtgggcggaagtggcggctggaaagcgggggatatgtgctttctatttagagtgccacccccgccggtgggcctggaagtccataagcttcacaccaaagctacacagagagaagaaacagtcaacacaccatgcgagcagactactgagacagaagcccatcggtccacatgtgttaaaaccacacatggggatagccacccaagctgcccggcatgcagtgaagcggcaaggaccagactaatggccacccctgagcaactccactcggcttcaagcctgagcaaagccaatgaacctggtactgttcaatgtctttgatcaatttgggtgtgagcagctaaaagcaaataggcaggcctcatcttgaatgacatcatgttagtgtgtttatccccatacttcctctgctgtttttttccccctttagacatgtggtctcactccaccacccaggctggagtgcttggcactccagtggagcaatcatagctcactacagtgccaaactcctgggctcaaacaatcctccagcctcagcctctggagcagcttggactactggcacacatcaccatactgggatactaaaaaaaaatttttttttgtagagatgcggtctcactacattgcccaggctgatgtcaaactcctggcctcaagtattcctcctgccttggtctctcaaagtgctgggattacaggcataagtcaccacatccggcctatttccatacttcctagttcccatctcaaatctgtttttggggaatgacacagaagtcaagtccagaaggcctaccaatggcagtgtaaggttatcacaccacactgcctcttaactgagatgagatgtagaaacaatcctatgtgcatatgcagactacatgtgaaaggtacataaggctggaaaagctgggcatggtagctcacacctgtaatcttagcactttgggaggacaagnngtgggaggatcgctttagcttggaaattcaagaccagcttgggaaacatcgtgaggccctgtctctacaaaaaactatttttttagaaaattagctgcgtgaggtggtgcgtgcctatagtcccagctagtcaggtgtgtgaggtgggagggctgcctgagcccaggaggtcaaggctgctgtgagccatgatcataccactgcactctagcctgggcacataaccctgtctcaaaaaaacaaaaaccaaaaagactggaaaaagccgttgctttggggaagggaatggtggctggatgtggctggagagggtggaaggaaggctgacttttcacttaaggcgactgatctatgaacttaacaactttttctttcagttcaaaaagtaaaaagatacctggcttcttgagctcgtgcttactgggtcagctggcagggagaatacacaaggcaggtaactgagaattgtctgtcacgtgctaactagactcatgcactgtattctgtaacttaaaatatatgaaagctaattttgttacaggtagagtctgtcatcaggaaatactactgaatgtatgaatgagggttcagagaggtaatacgtctgcatagaataaatgtggattttggaaggacagaatagggacagaataatgcattctcctttgctaggggtaaaaaatgcaatacaaagaacaagaaacaaacagcacacctcactataagactgagcaattaaaataagagcttgtcacttcgttttaatgtaaaactatttctagtagtattatttaatataccaagaaaagcatattacttccaacaggcctcttaactgttagcattcctagtgagtacagtggcatttcatcacacacatgggacaggttggcatccaaaggcacaaattacaaacagtcttaatcacccttgaaaatcccatgaattgcccatagaaaagagtatatagagacacactgcttctcactaagttcaacactgccatttttttttcttctagaattggcaaatactgaggtttttcccactgaacatcaaattcagtggttggcttccattgtggggccacattataccagaaatatgtctccttaaacgccaaatcactcaactcactgtgccaggtgggtgttctcacactcaattctggacaaaagtccacactattgaatttattttcctttctgtttccccccactcacgtacatctgggtcacttttaacatgtgtatgatgccgttccactgcagggcttaccaagcgacaccaccaagttaagctggaatacacgtggaagaaacgttaactgagaagctacacactgactttatggtgagattagtgcttggaatgacctacagcagaattccagaaactatctggacaccatcagtcatgggtggatggcgaccactctcaaatcccaagtccactgagcgataccagataccacgggtctaacaacatatttactgctggtttggaagtgaacggtcaaatcatacctttccttcttcaccaggtctccttccatcaccggcgtgctagcaggccgcttcctctccagggtccccgagtcagagtcgtttccagtgtggaatgagtgattagaactcggggtggtgagaggtacaaatgcttctgatacagtaaattccacctctgcaagaggaaaaataaacaagtgcatgagacactgagcacagcaggcgagggagctctaagacacccctcattggaacgggaacctcgttcttcagtccacagccctcactatttcaaagtggaagctccaggcactcacatcgcaagaatggtccatcaaaccagtgggaagtaatgttaagaggacaagacaggggaagaagtatgggtcagaatataagttacacacttttgtgctttctcttttgtggaaaaaaaataaataaaaacaaatctagaatgtagaagaggacgatgagcacagatcacttatttgaatcattcaaaaagagacatttagctgggtgtggtggctcatgcctgcaatctcagcactttgggaggccaaggcaggcggatcacttgaggtcaggagttcaagaccagcctggccaagaacgtgaaaccccgtctctactaaaaatacaaaaaattagctgggcatggtgatgtatgcctgtattcccagctactcaggaggctgaggcaggagaatcgcttgaacctgggaggcagaggttgcagtgggccgagatcgcgccactgcacttcagcctgggcgacagagcaagactctgtctcaaaaaaaaaaaaaaaaagagagatatttacactttaatataaaatagaaataaaaggcaacatcaagttcatactgcctttagcagtttttgcaagaatcatttcctcaaaggaaaccttgagcagaatgctagcattcgctcatccatcccatcctcactgggcaacctatatgaatgaggcgtgattcctgatggtgacaaaacagtggtaaagaaaagatgggctcagtggtgagggaaagatgggtatcatggggcttgcaccccacgggacatggcagcagggttgctctgggggaagtaggtgtgggggatccggaattccaacacttgcctggccagcatccccaaagggggccatgggaacctctgtggatcccagaactgcaacaaacctagtttgaaaatctattgccagcaggatgaaatactaattccctgacacagccaactcaggccttcaccagctggccccgatcaacctttcctgctttatctcctatctatgggcaaatccataatctagctagagaaacaagccctcttccaagtgaaaaactccagcatattcaacatcgcctcttctaaaaaccaatccctggttcccttttcccagcacttgagtttgtcaaatctttctccatccacctatcttctaatgtgccttgtgttataatttatctgttcatgtggccatcttctccagtggccggagttcccccaggtaagacggcatgtttcaccagcaaacatatggcacccagtgggtattcaacatacactgactggctatgttttagtgaaactaagtgaaatacaatacaatatgattaccatcatgtcaaaatacaaatgcaatgaacaaaggctggaaagaaacatgaaaaagtgaaaccaattacgtaatcatgaagaaggattacagatgtattctcttaagaagactttttgtacgattatcacattgctttggcggtcaatgaaactgaagtgagaattaccttcagggaagaaccagtcggcatgctgaatgatgggttcaatcactgcaaccacatggacggatgtggctgctgccatttcagcaagtgttctgcaaagcaagttcacaaaattaaaatacttcctgtaggcagcatctaatttcttctggttgtgtcagggcaattcaattatttttaaaggataaaatatttaaaagatgcaaaaatcaaaatcactggccgggtgtggtggctcacacctgtaaccccagcactttgggaggctgaggcgggcggatcacaaggtcaagagatcgagacaatcctggccaacatggtgaaaccccgtctgtactaaaaatacaaaaattagccaggcgtggtggtgcgttcgcatagtcccagctactcgggaggctgaggcaggagaatcgcttgaacccggaagatggaggttgcagtgagccaagatcaggccactgcactccagcctagtgacagagcgaaactctgtctcaaaaaaaaaaaaaaaaaatcaaattcacatggtcctggtctatgaatgtggccgtgatcacccaggaaaaaatgactctggcttggctgctccttagtgtgcactgtgataacaaccacagtgtctgctacacacagaccctgggggcagcaaaaccagtcagtcaacaatgctgtgtcaaatgctggttttaaactggtctgtaaagagggttgcactttcccactggaatagcatcacacatgggtggtagctatgttctaagactaaagattactaaaaagcaattttgcctacgatatcaccaagaacatgcattgttacagtgtgccttttattttttatttttttattttttattttttgagacagaatctcgctctatcgcccaggctggagtgcagtggcgctatctcagctcactgcaagctccgcctcctgggttcacaccattctcctgcctcagcctcccgagtagctgggactacaggcacctgccaccgcgcccagctaattttttgtatttttagtagagacagggtttcacggtgttagccaggatggtctcgatctcctgaccttgtgatctgcccgtctcggcctcccaaagtgctgggattacaggcgtgagccaccgcgcctggcaaatgtgccttttattatgttgaaacctgagcctcccattcacacgtaaggtcatcatatatgtggactagtctcaagatgagtgttcagatgttaatagtgtctgacgccaaggctcaaaaagaagaaaataagtaggccagacgcagtggctcacacctgtaatcccagcactttgggaggctgaggcagttagaccaggagttcaagaccagcctggacaacatagtgaaatcccatctctacaaaaatacaaaaattggccaggtgtggtggcatgcatctgtattcccagctaccggagaggctggggttggaggatagcctgagcccaggaggttgcggctgcagtgagccatgatcacaccactgcactccagcctggagaacaaagcgagaacttgtctcaaaaaaaaaaagaaaggaagaaagaagaagaagaagaagaaaaaagtaagagttattatcactgctatcaagctcctgtttcagctgagagtcagaacaccacaaaagcaaaccacctgcaaaaggcctgacactttctggccacctaccaggcttcaggttcttcacctcgcttaatttttacaacaacccgttatgaggcctacatgaggacactgggttcccaagctcaatcccaggtctgactgcctcaaacctctcctctcctatcactctgacctctcttcccatcagagtattttcacccactttccgaccaagtaaaatttcttgctcctttcaaattccagcttaaaattgaagctctgcctgtaaatgatccttcccagccttcctcccatgtggaatctgatcagtctgtgtgccttaaaactctgctggattagggaggaactgtcctctccatcctttcccatttttcttttaggagagtactggaaagctaataagggttaataaggacacaggctctgtatccagaacctgggcacaccagttccctgctgtgtgaccttaagcaaattactttttctttctaagagtcagcgtcctcatctgcaaaaacaaggacaacagtataaatgtcaatgattcaacctctatttgctatatatttctaatcaatttctcctttatgtcctctattcaaaaggttacttctgattactaaatgagatcatcacaatgccatccacagagtgacaatttcccagaagctttccagcggatcccccgacccctcctctattcaatctacattttgcaatgccaataaagttatctaagtgcaacttaagacattattctgcttaggaaccttaatgaatgactccccaccacccagaaaataagtcccagacacctcagtacaatgtgtgaggcccttgaaggctctggccttcccagtcacagcctcatgttctctgtcttcaagtttcacgaagccacgtgacatgcccataaacgatggaaaccaggccctttcaacagtgtcttggcccatccaggtcctggctgtacgaaactgttaactcatcaaggtacagctccagtgccattccctaaccagagctttccctgacttctcagcctgaattatgtttctttacctctgctgccgtcatacttgataaagggggcagaatacgctatcccaaaatatgctccttaggcataggattattttgagttaaagacacttgaaaaccatcacatgcaagaagagggctccgaccttcctttttcatcctgaaagcaggagataaactcccatgtgaaggatgccctccttataccaggaggaaagaaacattcctaacaccagggacggggaggcaaggctgagggaaacctccataaacaaaccttgctgaacgaatccttatcttcctagtcacttctccacaactaactgccctagcccatgctcctttgtctggtcacgttttcacaatttactttttgtccaacttcatatataagcattcagttccacctgcttctttggatcttccttttcctatgggaactccaatgtcagacatgacactgatgcttcaaattcatcataatatacgtgaaatcccattcccagtagtcccaagttactctccaaagtgatgtgtttttttattaatgtgctaagtaggcatgaattaaatggcttctctgctgggcattaaaatgtaaaaatctgtatgctttctcctgttaacctgtcttatgtccatttagttctcaggcccagccagacaccctaagagggtggaagtgctacccctcctacaatatcatatatacacacacataaatatgtgtatttttcttatcactgtactgtagccactgagctatctgactgcctaagagcaggggcattttgagaactgggacaatgtctcacacatctttgtgtcaccaccagctgggacagcacccagctcacagctgtgttccaagaatataggctgaatgagaaaaccaacttcagaataccttgaattgatcttaaactagaatgtgtaacctgagttacatttctatgcatcccatcaggtgggaaagaagaaattcaaatgatacagagaaagatgacttacccttcatttctggcccataacaagttagggcctaacacaatcgcaatgttgctgggagtcattttattcacatcgctggtctgagcaagctttgcaaggaacttgatcaaatatctaggggtcaaaagagaaggggagggtttctcctctgaaatagctgctggaatgttctcttcctgcctgggtgcacaatcccagtttgctcaggtgctaactgcagagggttcctaaatcagaatctggctcaggtgaagcattttatacatttcttgtgttctttgcttcagataatagactaattagggcttggaagaagaaaataggttaagtctaaatctcagtgatttgaacccctattggctgtatatttctaatcaatttctcctttatgtcctatctattctacccctattataagttataatgtgttaatagtgagctcaatatttttaaatacaaaaacagacacagttatattgcttacaggaaactgtatttgaaaacactttatggtggaattataaaaatatccaatttatcatatatacctaccttatgtataagtacagtcatataaaggcaaaaacgtaagaacaacctatcaatagggagctgcttaaataaatcacagtatatccatacagtggaggactatgctaccatcattacaaaatgtactgagaaggaaaaatctccaagatgtattacgcaaataccttaagctgtcaagcaaaaaaggtaagggggagaatgacgtatacaatatacactaccatttggttttttaaaaagggggtgtgagaggaaaaacacacaggcaagtatgtacacacgaatgtatctgcttacgtctacattaactcttgctgagaggatatataagaaactgtaaacactggatgcatcccaggagaggaactgggtggctggggtatgggaacaggagagagatttttcatcgtataccatttgaattttgaaccatgggaatgtgctccctattcaaaaatcaattagtaacaattacagagtaaaataaacaaaataaagagccaaactctcaacatactaagaagtactgagctctcaccatatacactgaatagaggaagagtatctgtaattccaaggtgggtgagttaaattaatcaaagggaatatttaaaaggcagtatgtagcttagcttagtaggagagcccaaggcggaatttaaggacaagtaacattccaggcatatcacctgtaaactattctgactggtcacttaatgtcactcaaaaccaaacaaggaaaattttctaggggcactttctagaaaattttctttgtttggttttgagtgactttaccacctgaggccactttttccttttctctatacttgttcaaagttacatattaagtcaaaaggaaaacagaagttacattatggaagttttgtcccatggtaaattttcttaaaaccacagttattccacaaagcaatatataatctccattctttgaaattttatttagtaagatgatttatactttaaattaagtagcatatataaaagacattacagaatgtacaattattgattaattttgccttttaacatactggatgatttggactccaaacccaacatacagtcactcaaacttttcacaagaaatttattgctaatagctgtagtgggaaaatgataagccaacttacgtattaatgtcaggcatgatactgatgcttcaaattcatcataatatacatgaaatcccattcccagtagccccaagttactctccaaagtgatgtggttttttttgttgttgttgttgttttttaatgtgccaagtatgcctgaattaaatgacttctctgctgggcattaaacttatcttcactccagagtcattgtagctcaatcatacatacctaaagttaacaaaattttgtggtggcaacttctgacatgttctccacaagtcttgaagttttttgtcttgatcctgcacactgagaacaaaaacttttaagtacaacaacttattaagacaccaattatcttattaatatgctatgttaaaaatgaggcctccattttgacagagaaagcacagttggaaaacagcccatgctatggaaataaacagatttagagtcaaataccaattaactgtttaactctgcgcagttggttaaccttcaatctctggatgtgcaaaacagggtaagtgttgattctgctgaacgattttgaggcgtctgtgacaaaaccacctccaccaatgcttggcacagaagagacaagacactactgaaaattctgtctagaaaaagtgtgtactgacgtatggctttacagaacccaaattctcctaccctcaagcagcccagccacagatcagggggctgagctcccaggcacccagacctctgggtctttcctcgcttgcaatactgcaaactggctgcacatcaagcagcccatttctgttgtgaagcaactgtaagagctcttgcactccacaggcgcaacgtacaaacttgcagagacataaaaaaggggcagtgaggagcctgtagagcacggccaactctgcccactagggaccaagagtgttaaaggggcctctataacaccactttgaacgtgaaatatcctccagaacagaaccattctggagaacatggatagggattaaacataattacactttagaggccagtcgatgtgttactgggatggaagcccacccatattgacaattctcaactatagaatcaatataccaacagatagacgccttcttttacaagtttatttccttgtaataaacaaggaaatcttttattgggtaggaggctagccaataaaagaaatcccacaactctcttctacctaacactgatgttggattctactgaattctgtcccataaacattaatactgacagcaggctgggccccaggcagggttccaaggatacgtgatgactaagaacttgtctctgaacttaaaaacctcaccatctaccagggacaaagtctcattccacaattacagagaaaagctcaaatgcggctgagcgcggtggtttatgccagtaatcccagcagtttgggaggccgaggcaggcagattgcctgaggtcaggagtttgagaccagtctggccaacatggtgaaaccttgtctctactaaaaatacaaaaaaattagccaggcatggtggtgtgcgcctgtaatcccagctactcaggaggctgaggcaggggaattgcttgaaccaggaggtggaggttgcagtgaccctagactgtgccactgcactccagcctgggcgacagagtgggactccaactcaaaaaaaaaaaaaaaaaaaaaagaaaaaagctcaaatgcaaaacctggttaaagacacaagcgatggactcacatccactgaagtgtaactgatcagaaataagtggctcttatttgatcatggcctgcctgcagggaacaggggcagtgtccgtagacggggaagaggacagaacagaggtgagatttgttcctcttcccttagtggtgaggagtaggcactctggagaggaggggagtcagcgccatgagaaaaaagacgaggaggtgggctggccagccaagcagaagcctctaggctttttaaacaaagctgtcctgcttaaaatcatctgttcctagacagactgaagctgagggtggagggaaagggacgaagtagaggaatatagcatttgggtctgtctggtttgaattctagctctgccaattacttgctactctcctggccctgttccctcccaagcctcagtttcctctctgtaaaatgtggatcacaacatcatctgccttttataacgttaattaaagattacaggaggtaatagctacaaagatgagcacagtacttagcacaagaaaatgctcagtaaatattaatgtcatcattatacagctgacaacacaaggtccacttatatgcaaatttttcaataaacatataggaaaattcctggagatctcggacaatctgaaaaaactcacagatgaactgccacccctgaaacaggaagaccaaccccttcactttctctgcttcttcaacctactcgacatgaagacaaggatgaagacctttaagatgatccacttccccttaatgaatagtaaacagattgtctcctccttacaattttcttaatagtactttttctctagcttatctattgtaagaatacagtatataatacatacaacatacaaaatatgtgttaattgactaggttatcagtaaggcttccagtcaacagtatgctattagttgttttgagggagttaaaagtatacttgaatttgcaattatgtagggtatcaatgcccctaatccccatgctgtttaaaggccaactgtattatcgcacaggtgagactgcacacagctcaaaaggcacactgccacgggtcagtatgacccctatccccagttacagggctttcttcaacataaagggggctggaaatttgcaaatccattaatgtgggtaccactctatgtcttcatccacctaaataacacaaatttaaaccaatgcctacgtggtgactttcctacactaataattataatacttgatatttttattctaaacataaataagagctgagacatgtattatttaacaaatacgctattttaatcttatgatccctgagaataaaatgatttgcaaatagggcacaatatcacttcattccctttaacatttacaactctgtgttctttaaacttaccttgcaacttgtgtccattcttcatacagattaaaagtcatcaaaggttcaggcaattcccgtaaataggattttaaagcacctgaaatcattaacactctctttgagtatgaaaaaggggtaaggctaggaatcttgggacatattattttgcaaattgaaatgatctcaataacgatcttccaaggtgtacataacaaatcataagttggcaagagttgttagagactaaaatgttcataaaacaaattcaatctctgaaaaaaaaaagttttaagagatcaattacaaataaaattagttttaaagtcatccccttaacagacataatttctccaggtagaaaggaatttggtggggggagactgtgaaagatgggaagaaaatacaaatatgtctccaaatatttgcattataagctactctctcttttaatcatcaaaatagaaaaacagaaaaggagtaaagaagacacagtgtacattacattgtatatacactaaggaattgtagcaagagccacttcggttttgtcacttaaacctgtaactgaaattggattttaactgaccatctgtctgagacagaacctgcccaccgccttgagggtgacttgatttgcagacactctttggcgctcacctgctacagcatgggggtctgaatagaactcatccaggtgagaagtagaacagtccaaagcagctttcagcttctttaacttggaggccccagccccaattcggaaaaggccctaaagataatgaaaagccatcagcatcaagtgcaggttgggacactcagactaagtggcagtgtgttctgatgggtatttcctgacttccgctcacctcctgtctatgaaagcagtgttactgcctgccctgcagggctgtcaggaggaatgatgagggctgagcacgcacccaagcacagggacaggcaggaagaaaattaatctgggcagagtttcttgacctcagcactatggacattttaggctggatgattttttgttggaggttgtcctgtgccctgtaggatgtttagcagaatccatggtgatatggtttggttctgtgtccccacccaaatctcatgtggaagtatgatctccagtgttgaaggcagggcctggtgggaggtgactggatcatgggggtggatttcccttttgctgttcttgtgatagtgagtgagatctcacatgatctggttgtttgaaagtgtgtagcaactccccctttgtgcgcatgctcgctctttccctcctgttccaccacgtgaacactgcctgcttccccttccgccatgactgtaagtttcctgaggcctctccagccacgattcctgtacagcctgtggaactgtgagtcaggtaaagctcttttcgtcataaattacccaggctcaggtagttctttacagcagtgtgagaatggacgaatacacatggcctctactactagatgacagtaacacctcctcttctcagttgtgatgatccaaaatacctccagaccttgacaaatgtctcctggggagcaaatctggccccagacaagaagcaccaatgtaggctgttagaaggggagtggctggaagcaaacacaaggagggcttccgggatgttctttgatctgagcgccgactccatgggtgggtttagtcatgcaagcacatcaagctgtacacctatgatatgtatgcttttctgtatgtacgttctatttcaatacaaagctttaaaaaggaaaaaaaaaaagccttgcattttgattctagctctgacctggagtaaactccctgcatgctgacttccttatttatacaagaagagtaataaaaactcccttatttggttcatggggggtttggggtaagaatcctgtaaaattaagtatgtaaatgacctccaaccaaaaaaactgcataatactatgcaaatgtaaactaaagctccttagcccattagtgcgtcacgaaatctattgtcacaaatcacaaccagagttttaaatgaaacaatcaaacaggacacaaagaggtcagggtgtaccacaatcaggaaaggtaaacattgttttgtaaaacctttgtttcattcatagacagataggtatcatagggaacagggttgcaatttaaaatatggatcatggtgacaaaagcttgaaagccactgttctacacaaaacggacaatggctgtataactaagcaggggtggacagggggctggcggggagcatggtgctctgggtacaacaaggggcatggagacttggtgcacaggatcacgaagctcccctcacctcctccttcatgcctgtctccagaagcagcatgacacaggcttcaatgggcagcgcaatctcgcgcccgctcctcttcaggtgttcttctaggggagtcccaaaggctggtttttccgcccacttatctagagcagcaaattgttcagttagacacccaacaaactcacggcattaccaagctattttctccccaactacccaatgggcttttctagccgactggtaggtgaggctgtgcaagaggggatacatctgttctatttgcttttgttatttgccatctactggagcagcaaactatggaccaggctggggcggttacttgtggaacagaagcctgagcgtacctagatggcaccaactcaggctgcccagaagctgcagtggcacgctgcacctgcaccacacttcatcaacacacgccagcgggtttagtgggctgccttgaaccaaaaggaagatttgccagagcataccgtttcgttgaaaagaaatttattctagccatgcaaagccttctagctagaggacaagaaatagattctttgctatgcaaaaatggaaatgatctctgaaaatttcaaacacaagttaagtatctgtcatacaagactggagatggccaacgtgaactctccacgttgcagttactctccatcagatgcgacatctccgcggcatgcagtgcttcagaacaccgcatccccaaacagctccgaaaaattctgagtggaaagaaatgcagcatctgcagccctaaagcagctgaaggctatgctgatggcaggaaagccatattttagattatcttcaggttatgaggcagcttagcacaaatacaatgaagcagtaaaatagaaagaagaatttagagaacggacatatgaattagaataagaagtatctggttgaatttggcctgcctgtgcaagctgcagagatctagtgctatctgagcagctcgcagaagcaaaggagggcaaaccagttgtgaaaactgctccagggagaaacacttaaatctttccaacaacaggaagggttcatgtccttctctgcacctttactggccattggtcccttagcagctctgctgttagaaagctgggttggaagaaggcagtatgtactctggtgtgtcctcttacactctctcccatgtcacagcaggggtagatttgcacatggggaaggaagaaaaataaaatcccacaaatccatagaaccgagagcttgtggaaaggtaaaaatggatggaaagagcaagaggtaaagactgaagaaaggggtgagggaaaggaaggtgggggacaaaaatgaggtgcaggccaccagccactctcagaattgtggggagccctcctcgtctctggcccggccccagctggggaatttccaatagaaaacgcatctgggggtctggaccttcccagaggtcaaatcttacctgaaatactttgtcccttttatctaaagcaataagttacaacacaggctgaaaatggccacgtgagccttccactaggggatgccctggaatcacccaggggggttctgcaaatgacacccgccattgccttcaccacaagcccaaccctgtaatgctaaggggcgggcatgcttcaaacctctgctggaactttctagtaaacactggacagagtgtaccccacccccaagcctggtataatgttgacagagggtgcaagtgagaaccactgacctagaagcaagtcataaggcaaattccacctcaggcactggcctctcaaacaacagacctactatgtgtcaggtactgcaggaggcatgtaaagttaacagagactccctaccctcaggaagagggcaattgaattgtgaagggaatataagacacacatgtaaacacagaacagtcaataacaagacaagacatatttgctaagtcatggcagatcgatggtatagacaagggttgcaaatgcaattgtccagaggagtcggataggtagcacaggggcacaaatcctgctgggagtgcacgatctgccgacaggcgataaccactcctctgcaccaaaccaacactgccacgtgggaaagcaaagccagtgttgccagatgttctcaactttcaggagaagccagaaatcagaattgttacatcaaaccatctggttttcacatgatgacaaccaacttttaacaatttttaatgagatatggctgtttgcgacttctggtgtagaccataaatgctggcacaattcaagaggcaaagtgtttgccattggcttcagctgtcggagaaggcttctcaaaggaaatgaggttggagggggtctcatgagacggacagagattaaacaggctgaaaaacggacaaacacatctttgtgaggggcaatcagctgagaaaagatcaggaattgtgagtctgggaatttacatcttatcccaagttcacgccaaggccgtgagagcatggagcagagtgggccaggggaagagaggatgacagagcctagggcgaaatggacagaacccaggcactggatggaagagaggaaggagaaaagggttccaaggttaagacctgaatcacttggagaaaggtgatataagggagacaagaagggagaaaagggacagttggagtgggaagaggactggtttgctttttgagtttaaggtgagtgctgttcatcaaagggaaccgatgcttaggaggctgcaaggattaaaatgcaggtaagaggcaaagctgtccaagtaaggggatttctagggaaaagggggcgaggaagtgagggtgggagagaacagaggtgcaaggactggacctcagaaaaggctgacttctggggtggagacagaaatgagcaatatataatccttcttgaagaaaaatttttaaaaagaaatggagcaatgcagagtccttacaatgaaagaagacagtcgagtggcgtgaggagacaaaaatgaataaggaagggacggcccatgccgggtcaaatgccaggatctgacgggtggttgctggtcctttgaaaactgcagtatgttttgctcttttttcctaaacagcagagggattgggggtagacacaagagtgcaaaggattcaggagtaggaaggtggtaagaaaatgcaggtggcaggcaggaaggggtcatctgaagtacccaccagaaaaaatgaaggagaaccagattaaacaggacgctgtgttcaggtcaggaaggtaccagattaccaccaactgaccatgaatgtgacaccagagtccacggaggtgagggggctgtgggggcaggtcacactttttttatatagtaaggacaagataagtctttctgaaaacagagaagacagcaaggaaagaaaagacagaactaagatgaaaggcaggtacaaggacaggcagaggtgggaggggttgaattgcaactcggtaaagggtgacctcagcaagaaggacaaatcgcacttcctccacgggctgttccatcctaacctctttcctgtcccatccccgctctccatggcttcctgatgtatttctctagggaaaatacccttgggaaaaaaacagaatgagagttctagtctagcctgggcaacagagtgagactttgtctctttaaaacaaacaaacaaacaaaatgcgaaaaaaaatccaatctctcgtttttcctcttgttaatcaactctttcaaatcagactctcagccattcaaaggctaaaatgatgatttgtctactattttgtcctatgcggggcccagcccacagcagatatctcataaatatattttcttggtcctctgaacttgcccagcaagagtctgtccctagaaaggtgggaacattttccagagacctcgttcctttgcactgtgactcaacaccatcctccatgaactaataatcttgattatttgggaaggcaagggcaatggctgagaaaatcagaaacactgcccctgagaatgctgaagatctgactatatggtcaggcaagacataaaattttataattccataatcccaaaattttcaggcacaaagccagaacctgtgaggatctcctggaacttagggggagaagaagtcgcattcttgaaggtgctggtatgtatgcacatccacaaagcatcccccccacaacacacacagacacatgctcggtctcaaaatcacaaagtcatcccactcagcacctggcctgatcccctttcagctcaagaccagtggttctgcagaggagcataagctccaaatgtcaggtctacaccacaggtgaaatagatccaaagacggccgagcaatttctgactcaacagctgtgctcatctctgctggtaaatgctctaatggtaaatcagagagacacagcatcgaaagctttagggagagaaaaaaaaaaaagcagctttagatgcccaacttaaaattcaacataaggggaaagttcagtctgcacctaacttgcagatacaatctgcagtgtgcttgaatatgataggagaaatattaatggtgataagaacaaaagcttagtataaagacaaaggaggagtctgaacgaagcgaccacggtcttaggattcaatcacacttattattaagtgtgacgtgcatgatgtggcatcaagtactggcttctcttttggaaagtccaaaatattttccctagaatggatgctcttggagtcacatggccagaattaagtcctgtggaacaaataactgatgtggaaaaggatcattcaatgctggactttttcaagcctacagaagatgggaaaacacacaggtactccccaaagaggccagctttctcttcaactgaaggtttcagaagaactacaaatgttccattagtgtgttaatttgggtttggaagaaattagagaatgcagcaaggaagatgaaattatgctgggaaacagtaccctcctaggcagagaagctttatcccaaggacgtgcatgcagaggagtcagggtgaagaagaacccaggcagaggtggcagaggcaagaaggaagcatcagccgcacgcgggttacattaccttgatgggctcgcatttcggggagggtcttttctaagactgctaatgcttttctatggtaatctgcttgggcttctaataactgagaacagacccacattcaaaaacaaaagtaacgttagcatcggatggacacacacacaatggctgagcaaaactaaaaatgaaatcttttgcaaaaaagctaaaatgactccattttaacaatgctttaacattttctcaagggaaggtgcttaccgtaacaaagaatttgccatactccccttctttggccataaagttgtacatgtctgctgcaagttgatcctgggtaaatggaagataagaggttattgaagaaaaaagaagtgaaacaaaatggcatctgagaacaatctctgtgagctcttagatgaaaaagtgatggaaagcaccacagattaaatgtccatcaactgcctggtacaaccatacagaaagaataaggaggcttcttacatgactgacaaagaaagatctccaagatatattttaacacatctgtttaagaagcaaagtacagagcattacttatggtgtattaacatctgggttaaaaaaggggtggaatggccgggcacgatggctcatgcctacaatcccagcactttgggaggctgaggtgggaggattgcttggagccaggaatttgagaacagcctggacaacagagcaagatctagtctctaagtaaaaaaaaaaaaaaattttttttttttttttttttttttttgagatggagtcttgcttgctctgtagcccaggctggagtctggtggcgcaatcttggcccaccgcaacctccatctccggggttcaagcgattctcctgcctcagcctcctgagtagctgggactacaggtgcataccaccatactcagctaatatttttctgttttttagtagagatggagtttcatcatgttggtcagcctggttttgaactcctgacctcaagtgatcctcccatctcagcctcacaaagtgctaggattacagatgtgagccactgcacctggccaaaaagaaattttaagtgacagattaggcaattaggtacgtatttccaatcttcaaatataaatatacataggaattttatatatatatatatatatgaaaacttatatgccggaaaatatatatgtagagagagttgttttttttttaatgtaatgacttctgtttttggcatcaaggtacacaaattaatgtgaagggcctcccatttatgacaaaaactggaaatgctagttagaagtaatgaacatccttttataataactgggaaagcaataaagtaaattccttgattcccctcaaccccaccatacacacacacacacaaagagagaaagaagaaaaagaagcagaaagaaagaaaaagtcggaatgctaagcatcaatggaagctggagatgacctggggcagatttgtgccagtcttggtgaccaaggtgtctgaagccttggggactagtaaggagaaacaagtacacatatatcatgcataaagataagattcctgaagaactgtactctcaacgaaacaacagattagaacaaatgcacttagcatcacatggaaatcatggggaagtatgtctgttttggaatgggctttaggtctgagaaacattggccaagagatttcacaaaacataggcctgctttcaggagggtttaaagtttaaatttactgacatgtggtcccagaaaccccaaactgatttaagtttaattaaaaatggacctggactggtaatactctctgggaagtctcattcccaatccctgatagtcccacagataaagcccctcttaaaatgagttcaaataattacaaaacacatgaggaaataatccaccacaagcagacacctaccactctcacagagaatttcagaaaacagaattaacagagattattaaataagtatgtttaaaatgacttaaaagaaagaaacactagaaaagaataatgtagtatcaaaaagatttgaataactagaacttcagaaatggaaaatatagtcaatgaaattaaaaactcagtgttatttgagtagcagatcaaacatagctaaagagagaatcagtgaaacagaacatagatctgaggaaattacccacaaggtatgcatagagagagaaggaggcagaaaatattttcttaagtttttaccacttgaaatactgacaagtgtggaagttgagagaacagacatcagcccatgatgacttcctaaacctctacccaaatttgtgtgcaataagtaggcaatagccaggatctaggttagaccagatattaagaagactgctgggtaaatgacactgacaaagctacaactcttcagaccacaaataagccaatgtgacattattttagtagaagcatttatctgaatatcatcttttaaacataaaaactttttaaaacaaaggcataactttgtgagtttagttttaatttctacccactatattatttttatatttttcttatatttctacccactatattattttaaacaagtcatttaattgcagttaactgatcaaggtttgctattttgaaaagcaaagtatgtcatgacctaaatgaactaaaatataacagtcttaatattagcaggaaataaaaaaacaatttttttaaaacaatgaaaaataagagcaggaaaagtctaagtcaatccagacttaagactctagattgtcaagactccccgaagacctattcctttaccatttcaaataatttcacctcaaataacattcagaatgaacatctatctacacaggtggatgcagagagaatgagatcacttgaccatctaattaatctgtaatttatgagataaaaagctctatttctcccaaattacaaaccaattgttcaagcaacattttaaaagtaatccttatcttctccaaggacatatgagccatttactgtatattaaattttacattatagcattcattccagaaaacctatactatttcactgatctattttaatgcttcttatacagttttacttcttttttcttacttttgtatttcttatgcatttttaatcgctgtaattttattatatgttttgctatggttttctttccttttttctgacttcatctttaaataagcttagacatcttgtcaagtttttaaaaatatcctatttgaaatttaaaatgttttattctgatcataaaataatatagtcttagagaagaagaaaataaaacctacctttaaaatcattcaaaatattctgatagaaattatttaaaacattaagtaacttacatttgaactttcatccctcatttgcaaaaaccgaaaagatacatttatcaaggaattctcataccttgcactgttctactttatttccagcttcatccatctcttcctttagagtatctatttttgatggaagcccctgaaagttggttcctgaggatttgtgagcttggttccacctgcaaaacaaaggggtcaccagcatctgagaaccagctgtgtatactcaacagctggaggcaggacctggtggagatagatccttccccacaattgattctacctggaaggggtatcattgcccaggatgccaaattctcttgagcttattctctaagaatggaagcaggcaaaaggagactttagcttctcaccatgacaggactctcatagtgctaggagtagtggtctgctttgagcataaccaaccacatcttgtctcacacaaactctactactggagagaaatccatggaacccctttcttgtggtggccaaccatggaatccctgccaccggaggagagcaaggtgctctccttgctctcttgctttgagctgaaatgttccctgtgccactgggaatcagctcctgcttttgagaactccttgtggctctttccactaccatactaccatctgtgacctgggattactttcagaaagtaaaagccagaacttcaatagtgtagctatgaggctgggtgcggtggctcacgcctgtaatcccaacactttgggaggctaaggtgggaggatcacttgagctagcagtttgagaccagcctggacaacacaacaagactccatgtctacaaacaacaataacaataataatgtaggtatcaatcaatagctatgaaagcactaaaaagaaaaaaaaagaaactatagtaataataggggaaaagtgggaaataatcatagaaaacaatttgttttgattttcaaatgtgctttgaccttctgtttgaaaatgggtatgtctggtgttgtggaaaactctatcactttaaatgtaaacatagatgttataaaatgcagcaagaaaacccacgttggccgggtgcgttggctcacgcctgtaatcccagcactttgggaagccgaggtgggcggatcatgaggtcaggatatcgagaccatcttggctaacacggtgaaaccccatctctactaaaaatacaaaacattagctgggcgtggtggcaggcgcctgtagtcccagcaacttgggaggctgaggcaggagaatggcgtgaacctgggaggcagagcttgcagtgagcccagaccaagatcgcaacgccgcactccagcctggggacagagtgagaccctgtctcaaacaaacaaacaaaaaaacccaaaaaacatgttagctacttactaaactttctagactgctgcagtgccccaaaatgctatgttctgcccactttgtgttcctgacgtgacacactcctccaccaaaaggcttcagcaagtcagccaaagctaaactggagatgctatattgtgaaaggagcatagatttcagagtctgacatgttcaagtttggagctcagctttatcttaactagttatgtgacctagttagtgacttagcctctatgcatctcagttgcctcatctacaaaactatcacaaacactgtctgccttgtggaactgtcataaggaggaaaagcgagaaaaatatgtgtgcatgtgcacagcatatgatgtctggcatataatggattcctacttattaccatttttttctccagggaaaagcaagaagaatgagaaaaagtggaaatattcaattgtttcagcttctccaacacctattgtgattaagtgaacaagaccatgaatgcaagatcaagaatcagtattaaaatcacctatgagatacatgcactcaagatgcaaaactcctgtcagataaacatctataataatgctcaaccaactctagtgagggagcatttgctgccttgtttaattaatcattagaatatttttccttctcttgagcaaagatgtatcgcagggtggcctgcactctcagctacacaggattccaatcacacgtacaggccaggtgtgatgactcacacctgtaatcccaacactgtgggaggtcaagaagagacatttacttgcggccaggagtttgagaccagcctgggcaacataccgagaccaggtctctactaaaaataaaaagctggggctggttgcagtggctcacgcctgtaatcctagcactttgggaggctaaggcagggaaatcacctgagatcaggagtttgagaccagcctggccaatgtggtgaaaccccatctctactaaaaatacaaaaattagccaggtgtggtggcacatgcttgtaatcccaactattaaggaggctgagacaggagtatcgcttgaacccagcaccttggttgcagtgagccaagattgtgccactgtactccagcctggttgacagagagagactccatcttaaaaaaaaaaaaaatagtagctgggtgtggtggtgtgcagctactcgagaggctgaggcaggaggatcccttgagcccaggagtttgaggttgcagtgagctatgatcacaccgctgcactccagcccaggtgacagggaacatcacatgtacacatgaccaggagactgtggactttgctgtcagaatcctaacactgcaatgtatgctcctgaaggcacaaagcaagtcatatagataacaaatgcaggtccctcccttatctgtaaaacaagtctcctctcaaaagtagggaatgttacactaacctctaccctgttccctccaagtcacatggaaaggcctatgcatttagagtctagcacaaagtctggtgcacactgagcacctaattgatatcagttgaaaacacagatgaacaaatgaacagggattgctgggagaatcaaatgggctgacataaaatgaaagtagctcgatctctggcatgtggcaagaggtaagttacttgataattgcactagcagagtcttcaccatgtgtgaattcctaaatataccttttctcatctcaacatttcttaaatcaggactcatcttcacaactgatttgtacacattgtaaataaagttttattggaacacagccatgctcattcatgtatgcattgcctacagctgcctttatgctacaacagcagagttaagcagttacaacagggagcaactgggttgcagcaccagaaagatttactatccagccctttacagaagaggtttgtcaacccttgtgataaagcaggaaacaggactgaggctggtggtgcctgtttccctattcccaactgtcacatgcctgagaagaaagccatgtaagtcactgatagaaactccactgagggccaggtaccacggctcatggctgtaatcccagcgctttgggaggccaaggtgggaggatcacttgaggccagaagttcaagaccagcctgggcaacacagctagacaccatctccaagctgtggcatgtgcctgtagtcccagctacctgggatgccgaggcagaaggatcacttgagcctgggagtctgaggctgcagtaagctatgatcgcaccagcctggtacagcagagcaagaccttgactcaaaaaaaaaaaaaaaaaaagaaaaggaaagaaaaaaaagccaaaaaactccatcaaggacaaagcagaggcagcagtcctgctctgaatcctgacagactccttcgcttgggcatcagtccccacatcagcagcgctgattnggctacataggtttacatgagttcctgccatgtgagtgcctccttccttggtactgaaggtattacaagtacacagggtttgtgacatggcaggaccctcatgagctgttagggccacagatgtgtttattcctacactctgagttgtgctctcaaaactgccaccatcccctcttccgttaaatatactcacttcattttccttagattatttcctttcactgctggctcactaagaacaggatgttctaacaacatccccactgccacgcttgggagaacaaggcctataggaggtgctggcaggctggcacccagtctgggggtcaaatgcacgaattggtgagcacttccattgtgtccactgtcagtggtcttctcccccgtggtgggaatgggacacaatgctgcattgctggctcaagctgttacctggctctgactgaatcccagtctaacaccaatcttgcaagctgcttcctctgcttctggatgttgggaatctccacctaaaaataagaacataccaaatgggatgcacttcagggcttttaggttaaccattttaaagtatttacaaacgttttttctctaaggcaaaggattttgtaccttcaattgactccccttatttccaaaaagaagtgtatgttaaagccagcaactactgttaaaattttaacactcactgtccagcccacaccactctcggctcttccgtgctgcacggtgaagcacccacctcagctatgccgtacagagggtccacgatctccttctcaacaaagacttcgtgctgggagagctcgagagccagctgattctcagcatctccacacgtctccagcatcttcctttaaaaacaagacccccaacaacg

SEQ ID NO: 1509 - DNA, 721 bp, Homo sapiens
ttgtagaggtgggctctcactatgttgaccagattggtctccaactcctggcctcaagcgatcttcctgcctcagcctcccaaagtgctgggattataggtgtgagccaccacgcccagctggaagaagtgatttttgaggtgagacctgaatggtaagaagaaaccatgtgaagatatgggacagaatgttctggaagccctaaggaggggatgaacttagttcattcaaggaaccaagagtggagtgtgttgagaggagggagtgtaagctctgggctcagaggtaggccccaccaaagcacagagaacccaggtgagaagttcgcatggaagccactgaagagtttaaccaagagacgacatgatctgcttggagttttaaagcaattcccctggctgctgggtggaggactgcagggaagacaggtgggagcagttcagattctgttaatcaggacctagaaagccttcaccccaattccgaagcaaaagtgcctcccagacccacaaagctgagaagtacagaggctgtggtagtctccaaacagagcgagggcttgggacaccaggaaaactgggagcatttctgcagaactgactgtttgttaagctttgtcacgcctaaggaaaaactaaatgtctgcttttctgttctctattttttcctttttctttaatgacttttctcttgaatgactgaattttctgcttgggatttt

SEQ ID NO: 1510 - DNA, 3363 bp, Homo sapiens
cctggccaggcatcccagggagacgcaggaaagtcagacctgagtgctgatggcccgggcctctgttcagtgtcttccctacgggccaatggcttatctcaggagaggcctggcaattacaagtgggctggttataacgtcataatctgctaacaaaaaaatgctttcaattctgcagcatcccatgtaatttcacctgcccagcagaaagggcattcatgttaaaaacacagggtccacccctgacatgtcacttgcctcttctgcctccaaagggctccatctgatacaatcacatatgcactggcttgtactggacagaatatctctgcaaggctatacaacaaactactaagagcaggggctctggaggagggaactgggtgcctggggaaatgggctaggaggcacttcactgtaagttcttttgtatattctgaattttgaccgtgtaaatgtagaacctattcaaaacagtaagctgaaatttaaaaataaacagaggcatttactcatttcccctctccccaaattattgatttttaaattttttgtagagacaaggtctcactatgttgcccaggctggtctcaaactcctagtctcaagcaatcctcccacctcggcttcctacaaaattattttcaaataaataaataatgggctccatctgcactacaaggagactattcccagctgccccatttctggacaaggaagacatgagaataataggggataattcctaccttttggttatgctgcctttctaaaggaggttaaatacctattaaagatcaatgcaataatcaagacaaatatattgtgcaactctggaactctaggagtctatggaaaaaaaataatagaaaactctattttgacaagcatcactcaagatggcagctgtaaatagttttgtggtttccctaacctgaccccaaagccacaacaatcttgtttcctatgtacataaataaggaaactctgcttaacatatgggctcattaatcaagtatcaacactgaactcctccacagggagggcttcgtgcttcctagaggtgaacagctttctatcatcagggataatttttttttttttttaagacagggtctggctctgttgcccaggctggaggtcagtgacgcgatctcagctcactgcaacccacttccggggttttgccatgttgcacaggctggtatcgactcctgagctcaagcaatccacccaccttggcctcccaaagtgctgagattacaggagtgcagcaccatgcctggccagggatgaattttaaatgctctaaagacttaatttgtaaaatgcatgccaatcgcacaaaaagaaataattctctaatctaataatctatcttatctgacccacgacagttctgccatgtcaatggtggctgggctgcaaaggtcacctgcctcatgtctctctcttcccttctattcttgcctcttcccatgcaggaagcatgttatgaggcctttgggaggttcctcctgtgttttctagagccctggagactgctgcaattttctccatattagtcttctctcaccattgttgtggtaactcctcttcccaagtgcaaagtgtaggcatcctcaaagccctgtctttggcactttcgtttgacgttggaaaaggaaagctaaagcattaggtttcagaaatgagggccaagcactttgccccagctgcctggaatattcccaccacctgccactaatttccctcctttatagggcagacaccacctcctccaggaagcctcacctaactacctccctcttcctctggtacccattctgggccccccataaaaccctgtgcatgttttattgagcatcttgttttataatgatccatttgtatgtatctcccccatgagaccatgaaaacttacatttcattcattttatatctccagcacttgtacacagtaggtgtttgataaatatttgtttctattgaatatatgtcttggactgcgtctcaaggaagacaacaggaactagatagaactgtgagggacagtgacatatttggggactggtgagtgttatgtggctggcacagggtgtgaacgggaagcagcaggagacaatgaagctgataaggagaaatggaatcagctgagaaagggcttaagtcatctaaagagtgtggactttatcccaggcaatgggaaccagccagtgtccctcagaagaagcacttctaacattaagatacttcctgtgtggaactatttcaccaggcactacaaaacatttagcatcttggccaggcacggaggctcacgcctataaccccagcacttcgggaggccgaggagggaggatcacttgaggtcaggagttggaaaccagcctggtcaacatggtgaaatcctgtctctactaaaaatacaaaaattagccaggcttggtggcgtgcacctgtagtcccagctactcgggaggctgaggtgggagaatcgtttgaaccgggtggtggaggatgcagtgagccgggatcaaccactgcgctccagcctgggcgacacagcaagattccatctcaaaaaacaaacaaacaaacaaaaaatgcttagcatctcggttcaccctccaaatgccagtggtgcctgccagtccctgtgatgaccgaactgtctctacacatttccatatgcccccaggggtgtaattctggtccctgttaagaaccactgagccaagatttttttttttaggcaggaggataatagggttgatttgtgtttcaggaaattgactctggtgatcaggttgaagacagactggaaaggaaattacagacaggaaatgtagctcaggaggtgactacaacagtccaggtgagagggagtcaggtcttgcattaaggccaaggtggtagagatgcaatggagatgagcaatttaaaatattcacagagagaaatcaaaggactttctaattaggcagttatggggtttggaggataaaataaaagcgaggcccagcacagtagctcatgcctgtaatcccaacactttgagaggccaaggcgggagaactgcttgagcccaggagttcaagaccagcctgggcaacagatgagacctcatctctactacgaaaaaaacaaacaaacaattagccaggcttggtggcgcaagcctgtagtcccagctacttaaaggttgaggtcgaaggatggcttgagcccaggaggttaatgttgcaatgggccgggatcgtgccactacactccagcacggacaacagagtgagaccctgtcttgaaaataaaaaataacaaggaatataagaaagccccccagtttccagcctgcataaa
